(19) United States
(12) Patent Application Publication
(10) Pub. No.: US 2006/0287259 A1
(43) Pub. Date: Dec. 21, 2006

(54) Compositions and methods for combined therapy of disease

(75) Inventors: Samuel J. Reich, Bala Cynwyd, PA (US); Michael J. Tolentino, Lakeland, FL (US)

Correspondence Address: PEPPER HAMILTON LLP, ONE MELLON CENTER, 50TH FLOOR, 500 GRANT STREET, PITTSBURGH, PA, 15219, US

(73) Assignee: The Trustees of the University of Pennsylvania

(21) Appl. No.: 11/021,541

(22) Filed: Dec. 23, 2004

Related U.S. Application Data
(60) Provisional application No. 60/532,099, filed on Dec. 23, 2003.

(51) Int. Cl. A61K 48/00

(52) U.S. Cl. 514/44

(57) ABSTRACT

A desired physiological state can be induced by altering the amount of gene products in target cells of a subject. The target cells are treated with at least one compound designed to reduce expression of at least one first gene by RNAi, and with at least one compound designed to increase expression from at least one second gene. The reduced expression of the first gene and the increased expression from the second gene in the target cells induces the desired physiological state in the subject. By altering target cell gene expression in this way, conditions such as angiogenesis or tumor growth and metastasis can be inhibited.

### CROSS REFERENCE TO RELATED INVENTIONS

[0001] This application claims the benefit of co-pending U.S. Provisional Application Ser. No. 60/532,099, filed Dec. 23, 2003, the entire disclosure of which is herein incorporated by reference.

### FIELD OF THE INVENTION

[0002] This invention relates to compositions and methods for treating diseases, in particular angiogenic diseases, by reducing expression of at least one gene and increasing the amount of gene product from another gene in a cell to achieve a desired physiological effect.

### BACKGROUND

[0003] In mature human tissues, the ability to initiate angiogenesis (also called “neovascularization”) is typically held under strict control through a balance of pro- and anti-angiogenic factors in the cells. Angiogenesis therefore occurs only under certain controlled circumstances in the adult, such as in wound healing or during certain stages of the menstrual cycle. Uncontrolled or inappropriate angiogenesis in mature organisms can cause a pathogenic condition.

[0004] For example, neovascularization of the choroid in the eye causes severe vision loss in patients with age-related macular degeneration (AMD). In diabetic retinopathy (DR), the iris, retina and optic nerve can be damaged by ocular neovascularization. Together, AMD and DR account for the majority of patients suffering from irreversible blindness worldwide. The pathogenic neovascularization seen in both AMD and DR are believed to involve an imbalance between pro- and anti-angiogenic factors in cells of the eye.

[0005] Many solid tumors will also initiate angiogenesis to ensure an adequate blood supply. The new blood vessels allow tumors to grow, damaging the surrounding normal tissues. The increased vascularity of the tumors also increases the ability of metastatic tumor cells to colonize distant sites in the body. The angiogenesis initiated by tumors is also thought to involve an alteration of the balance between pro- and anti-angiogenic factors in tumor cells.

[0006] Many of the intracellular pro- and anti-angiogenic factors have been identified. The primary pro-angiogenic factor is vascular endothelial growth factor (“VEGF”), also called vascular permeability factor (“VPF”). VEGF exists in at least four different alternative splice forms in humans (VEGF₁₂₁, VEGF₁₆₅, VEGF₁₈₉ and VEGF₂₀₆), all of which exert similar biological activities. Angiogenesis is initiated when secreted VEGF binds to the Flt-1 and Flk-1/KDR receptors (also called VEGF receptor 1 and VEGF receptor 2), which are expressed on the surface of endothelial cells.

[0007] Flt-1 and Flk-1/KDR are transmembrane protein tyrosine kinases, and binding of VEGF initiates a cell signal cascade resulting in the ultimate neovascularization in the surrounding tissue. Flt-1 and Flk-1/KDR are therefore also pro-angiogenic factors.

[0008] Another pro-angiogenic factor is the alpha subunit of hypoxia-inducible factor 1 (HIF-1). HIF-1 is a heterodimeric basic-helix-loop-helix-PAS transcription factor consisting of HIF-1 alpha and HIF-1 beta subunits. HIF-1 alpha expression and HIF-1 transcriptional activity increase exponentially as cellular oxygen concentration is decreased.

[0009] Yet another pro-angiogenic factor is ICAM-1, which is a 110 kilodalton member of the immunoglobulin superfamily that is typically expressed on a limited number of cells at low levels in the absence of stimulation. Upon stimulation with inflammatory mediators, a variety of cell types (e.g., endothelial, epithelial, fibroblastic and hematopoietic cells) in a variety of tissues express high levels of ICAM-1 on their surface. The interactions of the endothelial cells with the ECM during angiogenesis require alterations of cell-matrix contacts which are caused, in part, by an increase in ICAM-1 expression.

[0010] Two further pro-angiogenic factors are angiopoietin-1 (“Ang1”) and angiopoietin-2 (“Ang2”). Ang1 can act in concert with vascular endothelial growth factor (“VEGF”) to promote angiogenesis, although inhibition of Ang1 alone appears to block neovascularization. Ang2 is a context-dependent competitive antagonist of Tie2, but can also activate Tie2 under certain conditions. Thus, Ang2 can be pro- or anti-angiogenic depending on the intracellular environment. The Tie2 receptor can also be considered a pro-angiogenic factor.

[0011] Pigment epithelium-derived factor or “PEDF” is a potent anti-angiogenic factor. PEDF was first identified in retinal pigment epithelial cells, but it is also produced by other cells of the eye. Hypoxic conditions in the eye lead to downregulation of PEDF expression, and patients with AMD often lack PEDF in their vitreous.

[0012] Another anti-angiogenic factor is angiostatin, which is a proteolytic fragment of plasminogen. Adeno-associated viral vectors expressing angiostatin inhibit angiogenesis in rat and mouse models of ocular neovascularization. Endostatin also has anti-angiogenic properties, as demonstrated by a reduction in the size of laser-induced choroidal neovascularization in mice with high serum levels of endostatin. Subretinal injection of endostatin in a mouse model of retinopathy-of-prematurity also inhibited retinal neovascularization.

[0013] A mutant form of the “tissue inhibitor of metalloproteinase-3” or “TIMP-3” gene has been implicated in a macular neovascular disease called Sorsby's fundus dystrophy, and wild-type TIMP-3 has anti-angiogenic properties. Thus, TIMP-3 is considered to be an anti-angiogenic factor. TIMP1, 2 and 4 are also known to be anti-angiogenic factors.

[0014] Non-angiogenic diseases or physiological conditions can also result from a change in the relative amounts of certain gene products within a cell. For example, the Bcl-2 gene family includes anti-apoptotic (Bcl-2, Bcl-x_{L}) and pro-apoptotic (Bcl-x_{S}, Bak, Bax) genes. Members of the Bcl-2 family can mediate survival of erythroid cells. Altering the amount of gene products produced from pro- and anti-apoptotic Bcl-2 gene family members can lead to an increase in red cell destruction and anemia. Similarly, if the ratio of Bax to Bclx_{L} is increased in a cell, that cell undergoes apoptosis. Induction of apoptosis of specific cell types has implications for directed therapy of diseases such as cancer.

[0015] RNA interference (“RNAi”) is a method of post-transcriptional gene regulation that is conserved throughout many eukaryotic organisms. RNAi is induced by small or short (i.e., <30 nucleotide) double stranded RNA (“dsRNA”) molecules which are present in the cell. These short dsRNA molecules, called “small or short interfering RNA” or “siRNA,” cause the destruction of messenger RNAs (“mRNAs”) which share sequence homology with the siRNA. It is believed that the siRNA and the targeted mRNA bind to an RNA-induced silencing complex (“RISC”), which cleaves the targeted mRNA. The siRNA-induced RNAi exhibits multiple-turnover kinetics, with 1 siRNA molecule capable of inducing cleavage of approximately 1000 mRNA molecules. siRNA-mediated RNAi is therefore more effective than currently available technologies for inhibiting expression of a target gene, which bind to the target mRNA or protein in a 1:1 ratio. However, while RNAi can efficiently reduce the amount of cellular factor gene expression in a given cell, it does not increase the amount of anti-angiogenic factors within a cell.

[0016] PEDF has been delivered to retinal pigment epithelial cells by adenoviral and adeno-associated viral (AAV) expression vectors, and has reduced the level of experimentally-induced neovascularization in mice. AAV vectors expressing angiostatin and endostatin injected into the eye have also been used to rescue mouse models of ocular neovascularization. Ocular neovascularization in the mouse has also been inhibited by systemically-injected AAV vectors expressing endostatin. The systemically-injected AAV vectors transduce cells of the liver and cause increased serum levels of endostatin. These studies show that anti-angiogenic factors can inhibit ocular neovascularization regardless of whether the factors are produced in the eye or are provided systemically. However, increasing the level of anti-angiogenic factors in a given cell does not remove the pro-angiogenic signals still present within the cells.

[0017] What is needed, therefore, are compositions and methods which decrease expression of certain cellular factors and increase the level of other cellular factors in a given cell, in order to control different physiologic states in a subject. Compositions and methods which can both up-regulate anti-angiogenic factors and efficiently down-regulate pro-angiogenic factors in a given cell are particularly desirable.

### SUMMARY OF THE INVENTION

[0018] Different physiological states can be induced by decreasing expression of certain cellular factors by RNA interference (“RNAi”) in a cell, while increasing the level of other cellular factors in that same cell by conventional means. The use of RNAi to decrease gene expression is particularly advantageous in this context, as substantially all expression of a given cellular factor can be inhibited.

[0019] The invention therefore provides a method of inducing a desired physiological state by altering the relative amounts of gene products in target cells of a subject. The target cells are treated with an effective amount of at least one RNAi compound to reduce expression of at least one first gene, and with an effective amount of at least one compound that increases expression from at least one second gene present within the cell. Expression of the first gene in the target cells is reduced by inducing RNAi of the first gene. The reduced expression of the first gene and the increased expression from the second gene in the target cells induces the desired physiological state in the subject.

[0020] The invention also provides methods of treating an angiogenic disease or inhibiting angiogenesis in a subject by altering the relative amount of gene products in target cells of the subject. The target cells are treated with an effective amount of at least one RNAi compound to reduce expression of at least one pro-angiogenic gene, and with an effective amount of at least one anti-angiogenic compound to increase the level of anti-angiogenic factor from at least one anti-angiogenic gene. Expression of the pro-angiogenic gene in the target cells is reduced by inducing RNAi of the pro-angiogenic gene. The decreased expression of the pro-angiogenic gene and increased level of anti-angiogenic factor from at least one anti-angiogenic gene in the target cells inhibits angiogenesis in the subject.

[0021] The invention also provides methods of inducing apoptosis in target cells of a subject by altering the relative amount of gene products in the target cells. The target cells are treated with an effective amount of at least one RNAi compound to reduce expression of at least one anti-apoptotic gene, and with an effective amount of at least one pro-apoptotic compound that increases the level of at least one pro-apoptotic factor from at least one pro-apoptotic gene present within the cell. Expression of the anti-apoptotic gene in the target cells is reduced by inducing RNAi of the anti-apoptotic gene. The decreased expression of the anti-apoptotic gene and increased level of at least one pro-apoptotic factor from at least one pro-apoptotic gene in the target cells induces apoptosis in the target cells.

### BRIEF DESCRIPTION OF THE FIGURES

[0022] FIGS. 1A-1C are maps of exemplary vectors which can be used to construct plasmids of the invention which express RNAi compounds. 1A—vector pBLAST, which contains a multiple cloning site (MCS) with SgrAI, SalI, BamHI, PstI, NcoI and NheI restriction sites. 1B—vector pORF, which contains an MCS with SgrAI, SalI, BamHI, PstI, NcoI and NheI restriction sites. 1C—vector pORF9, which contains an MCS with SgrAI, SalI, BamHI, Eco47III, PstI, NcoI and NheI restriction sites. Each vector is shown with nucleic acid sequences to be expressed (indicated as “insert”) inserted into the MCS.

[0023] FIG. 2 is a schematic of a combination expression vector of the invention called “pAAVcombo.” The two adeno-associated viral inverted terminal repeats are shown as “AAV ITR.” Block arrows indicate promoters for expressing the genes comprising the downstream cassettes. The “therapeutic knockdown cassette” indicates the nucleic acid sequences for encoding the one or more genes to be expressed. The “RNAi knockdown cassette” indicates the nucleic acid sequences encoding the sense and antisense strands of the one or more dsRNA molecules to be expressed.

[0024] FIG. 3 is a schematic showing the HVEGF#5 siRNA target sequence, the double-stranded DNA insert used to construct plasmids which express a HVEGF#5 hairpin siRNA, and the structure of the hairpin HVEGF#5 siRNA transcribed from the double-stranded DNA insert.

[0025] FIG. 4 is a histogram showing that plasmid pCMS-PEDF-pU6-hVEGF#2 suppressed hypoxia induced up-regulation of human VEGF in 293 cells in a dose dependent manner. The serial doses of plasmids pCMS-PEDF-pU6-HVEGF#5, pCMS-PEDF-pU6-hVEGF#2, and pCMS-PEDF-pU6-NC (0.5 μg, 1 μg, and 2 μg) or controls (hVEGF#2 siRNA, plasmid pCMS-pU6-hVEGF#2, or transfection reagent only) were transfected into 293 cells. VEGF levels were measured in cell supernatants by ELISA 48 hours after hypoxia induction.

[0026] FIG. 5 is a histogram showing that plasmids pCMS-PEDF-pU6-HVEGF#5 and pCMS-PEDF-pU6-hVEGF#2 expressed human PEDF protein in HEK 293 cells in a dose and time dependent manner. The serial doses of plasmids pCMS-PEDF-pU6-HVEGF#5 and pCMS-PEDF-pU6-hVEGF#2 (0.5 μg, 1 g, and 2 μg) or controls (plasmid pCMS-pU6siRNAs) were transfected into HEK 293 cells. Human PEDF protein levels were measured in cell supernatants by ELISA 24 hours and 48 hours after hypoxia induction.

[0027] FIG. 6 is a histogram showing results of a cytotoxicity assay of HEK 293 cells transfected with siRNAs or plasmids as indicated. The cytotoxicity assay was performed with AlamarBlue by measuring cell proliferation 48 hours after transfection and hypoxia induction.

[0028] FIG. 7 is a photograph of an agarose gel showing that plasmids pCMS-PEDF-pU6-siRNAs expressed human PEDF in a dose dependent manner at the transcriptional level. RNAs from HEK 293 cells transfected with different doses of plasmids pCMS-PEDF-pU6-siRNAs (0.5 μg, 1 μg, and 2 μg) or negative control plasmid pCMS-pU6-siRNAs were extracted and subjected to RT-PCR for detection of human PEDF and control (human GAPDH) mRNA.

[0029] FIG. 8 is a histogram showing that plasmid pCMS-Angst-pU6-hHIF1α#11 suppressed hypoxia induced up-regulation of human VEGF in HEK 293 cells in a dose dependent manner. Serial doses of plasmids pCMS-Angst-pU6-hHIF1α#11 and negative control plasmid pCMS-Angst-pU6-NC (0.5 μg, 1 μg, and 2 μg each) or controls (hHIF1α#11 siRNA, plasmid pCMS-pU6-hHIF1α#11, or transfection reagent only) were transfected into HEK 293 cells. VEGF protein levels were measured in cell supernatants by ELISA at 48 hours after hypoxia induction.

[0030] FIG. 9 is a histogram showing that plasmid pCMS-Angst-pU6-hHIF1α#11 and negative control plasmid pCMS-Angst-pU6-NC expressed human angiostatin protein in HEK 293 cells in a dose and time dependent manner. Serial doses of plasmids pCMS-Angst-pU6-hHIF1α#11 and pCMS-Angst-pU6-NC (0.5 μg, 1 μg, and 2 μg) or controls (plasmids pCMS-pU6-hHIF1α#11 or pCMS-pU6-NC) were transfected into HEK 293 cells. Human angiostatin protein levels were measured in cell supernatants by ELISA at 24 hours and 48 hours after hypoxia induction.

[0031] FIG. 10 is a photograph of an agarose gel electrophoresis showing that plasmids pCMS-Angst-pU6-hHIF1α#11 and negative control plasmid pCMS-Angst-pU6-NC expressed human angiostatin in a dose dependent manner at the transcriptional level. RNAs from HEK 293 cells transfected with different 0.5 μg, 1 μg, and 2 μg of these plasmids or negative control plasmids pCMS-pU6-hHIF1α#11 or pCMS-pU6-NC were extracted, and RT-PCR of human angiostatin mRNA was performed.

[0032] FIG. 11 is a histogram showing a cytotoxicity assay of HEK 293 cells transfected with siRNAs or plasmids as indicated. The cytotoxicity assay was performed with AlamarBlue by measuring cell proliferation 48 hours after transfection and hypoxia induction.

### DETAILED DESCRIPTION OF THE INVENTION

[0033] The instant application contains a “lengthy” Sequence Listing which has been submitted via CD-R in lieu of a printed paper copy, and is hereby incorporated by reference in its entirety. Said CD-R, recorded on Dec. 21, 2004, are labeled “Copy 1” and “Copy 2”, respectively, and each contains only one identical 720 KB file (DBR-04-1324R.doc).

[0034] Unless otherwise indicated, all nucleic acid sequences herein are given in the 5′ to 3′ direction. Also, all deoxyribonucleotides in a nucleic acid sequence are represented by capital letters (e.g., deoxythymidine is “T”), and ribonucleotides in a nucleic acid sequence are represented by lower case letters (e.g., uridine is “u”).

[0035] Many cellular processes that mediate physiological states in an organism are controlled by the interaction of cellular factors which have opposite or antagonistic effects. A change in the relative amounts of these factors within a cell can initiate or inhibit a given physiological state. If the relative amounts of certain cellular factors are altered inappropriately, a pathologic physiological state can result.

[0036] For example, a cell which experiences hypoxic conditions can over-produce pro-angiogenic factors, causing the ratio of pro- to anti-angiogenic factors to increase. The increased ratio of pro- to anti-angiogenic factors results in the stimulation of angiogenesis. Angiogenesis can be inhibited by reducing the amount of pro-angiogenic factors and increasing the amount of anti-angiogenic factors inside a cell. Cells can also be induced to undergo apoptosis by altering the relative amounts of pro- and anti-apoptotic factors within a cell. For example, increasing the ratio of Bax to BclxL (or other anti-apoptotic factors) can induce apoptosis in a cell. Induction of apoptosis in certain cells can be used therapeutically to selectively remove those cells from a subject. For example, tumor cells can be induced to undergo apoptosis by the present methods as a treatment for cancer.

[0037] Thus, the invention provides a method of inducing a desired physiological state in a subject by reducing the expression of genes encoding certain cellular factors, and increasing expression of genes encoding other cellular factors, within target cells of the subject. As used herein, a “subject” includes any human or non-human animal; for example, a fish, reptile, bird or mammal. Preferred subjects are mammals, in particular ovines, bovines, rodents, felines, canines or primates. Particularly preferred subjects are primates, for example humans.

[0038] In the practice of the present methods, the target cells are treated with RNAI compounds designed to reduce expression of at least one first gene encoding a cellular factor which promotes a certain phenotype within the target cell. The target cells are also treated with compounds designed to increase the amount of a cellular factor from a second gene which is present within the cell. The cellular factor from the second gene induces the opposite phenotype than the first cellular factor, or is antagonistic to the first cellular factor. The amount of cellular factor from the second gene can be increased inside a cell by conventional means. For example, expression of a gene already present in a cell can be up-regulated, an expression vector encoding the cellular factor can be introduced into a target cell, or the cellular factor can be administered directly to the cell. Thus, the compounds designed to increase the amount of a cellular factor can comprise any substance which effect upregulation of a given gene or provide an increased amount of the gene product; for example, the cellular factor itself, an expression vector expressing the cellular factor, or transcriptional enhancers of the cellular factor gene. The reduced expression of the first gene and the increased amount of cellular factor from the second gene in the target cells induces the desired physiological state in the subject.

[0039] As used herein, a “physiological state” is any normal or pathologic condition in an organism. The physiological state can manifest at the cellular level (e.g., cell death) or the tissue level (e.g., inflammation, necrosis or angiogenesis). The physiological state can also manifest systemically, including through the production or amelioration of clinically observable symptoms.

[0040] A “normal condition” is any condition which is not considered detrimental to an organism. For example, death induced in unwanted cells (e.g., tumor cells) is a normal condition. Likewise, angiogenesis induced at wound sites or other areas in which neovascularization is beneficial is a normal condition. A “pathologic condition” is any condition which is considered detrimental to the organism. For example, tumor growth or metastasis, or angiogenesis which damages surrounding tissues, are pathologic conditions.

[0041] The physiological state induced by the present methods can also be the absence or inhibition of a normal or pathologic condition. For example, the induced physiological state can be the inhibition of tumor growth or metastasis. The induced physiological state can also be the inhibition or elimination of angiogenesis.

[0042] As used herein, a “target cell” includes any cell which can be treated to express at least one gene while reducing the expression of at least another gene for certain cellular factors. A gene is “expressed” in a target cell when RNA transcripts are produced in that cell which themselves have functionality (either with or without processing), or which are subsequently translated into a functional protein. Expression of a gene in a target cell can be detected directly; i.e., by detecting the presence of RNA transcripts or protein produced from the gene. Gene expression in a target cell can also be inferred from a change in cell phenotype which is expected to occur upon expression of the gene.

[0043] Expression of a gene in a target cell is “reduced” when there is a decrease in the amount of RNA transcripts produced from that gene in the target cell. In the practice of the present invention, gene expression is decreased by inducing RNAi of the gene in a target cell. Reduction of gene expression in a target cell can be determined by measuring the amount of RNA transcripts or protein produced from that gene after inducing RNAi, as compared to the amount of RNA transcripts or protein produced in the cell prior to treatment. Alternatively, the amount of RNA transcripts or protein produced in a target cell can be compared to the amount of RNA transcripts produced in an untreated target cell. Treatments suitable for inducing RNAi of a gene in a target cell are described in more detail below.

[0044] The level of a cellular factor in a target cell is “increased” after treatment when the amount of that factor present in the target cell is greater than the amount present in the cell before treatment. Alternatively, the amount of cellular factor present in the target cell after treatment can be compared to the amount of cellular factor present in an untreated target cell. Treatments suitable for increasing the level of a cellular factor in a target cell are described in more detail below.

[0045] As used herein, an “untreated target cell” refers to a cell which has not undergone treatment to reduce expression of cellular factor genes or to increase the amount of cellular factor inside the cell, but which is of the same type as the target cell. For example, if the target cell is a retinal pigment epithelial cell in a subject suffering from AMD, an untreated target cell can be a retinal pigment epithelial cell from an individual who is not suffering from AMD. The untreated target cell can be located in vivo or in vitro. Preferably, the untreated target cell is a cultured cell of the same type as the target cell. In one embodiment, the untreated target cell can be a retinal pigment epithelial cell. In another embodiment, the untreated target cell can be a tumor cell.

[0046] The level of gene expression in untreated target cells can be pre-determined, and used for subsequent comparison to the level of gene expression in target cells. One skilled in the art can readily determine the level of expression of cellular factor genes in an untreated target cell using standard molecular biology techniques. More conveniently, reduction in gene expression in a target cell can be inferred from a change in cell phenotype which is expected to occur upon reducing expression of the gene.

[0047] As used herein, a “gene” includes any nucleic acid sequence which encodes an RNA transcript that is itself a functional agent (such as in siRNA or micro RNA), or which is subsequently translated into a protein. A gene can comprise at least one promoter and termination signals operably linked to the nucleic acid sequence which encodes an RNA transcript. “Operably linked” refers to two or more nucleic acid sequences that are related physically or functionally. For example, a promoter is said to be “operably linked” to a DNA sequence that codes for an RNA, if the two sequences are situated such that the promoter affects the expression level of the DNA sequence. For purposes of the present invention, a gene can comprise a constitutive promoter, or can comprise an inducible promoter which initiates transcription only when the target is exposed to some particular external stimulus.

[0048] It is understood that a gene can comprise an uninterrupted nucleic acid sequence for encoding an RNA transcript, such as a cDNA sequence. A gene can also comprise an interrupted nucleic acid sequence encoding an RNA transcript that is processed. For example, a gene can comprise a nucleic acid sequence with intronic and exonic sequences. Genes can be located in the genome of a cell, or can be introduced into the cell, for example on an expression vector such as a plasmid or cosmid. The gene can be one which is naturally occurring, but which has been obtained in a recombinant form useful for expression in target cells.

[0049] In one embodiment, target cells are treated with compounds designed to reduce expression of at least one gene which encodes a cellular factor that promotes angiogenesis (hereinafter called a “pro-angiogenic gene”), and are also treated to increase the level of a cellular factor encoded by at least one gene which inhibits angiogenesis (hereinafter called a “anti-angiogenic gene”). Cellular factors encoded by pro-angiogenic genes are “pro-angiogenic factors.” Cellular factors encoded by anti-angiogenic genes are “anti-angiogenic factors.”

[0050] Pro-angiogenic genes include those listed in Table 1. The SEQ ID NOS. which correspond to the messenger RNA (mRNA) sequences encoding the corresponding pro-angiogenic factors are also given in Table 1.

TABLE 1
Pro-Angiogenic Genes

| Reference¹ | Pro-Angiogenic Gene | Organism | SEQ ID NO: |
|---|---|---|---|
| GenBank AF214570 | VEGF₁₂₁ (vascular endothelial | Homo sapiens | 1 |
| | growth factor isoform 121) | | |
| GenBank AF486837 | VEGF₁₆₅ (isoform 165) | Homo sapiens | 2 |
| | VEGF₁₈₉ (isoform 189) | Homo sapiens | 3 |
| | VEGF₂₀₆ (isoform 206) | Homo sapiens | 4 |
| | VEGF | Mus musculus | 5 |
| | Flt-1 (VEGF receptor 1) | Homo sapiens | 6 |
| | Flk-1/KDR (VEGF receptor 2) | Homo sapiens | 7 |
| Semenza G L (1999), Ann. Rev. | HIF-1 alpha (hypoxia inducible | Homo sapiens | 8 |
| Cell. Dev. Biol. 15: 551-578 | factor 1 alpha subunit) | | |
| GenBank NM_001530 | HIF-1 alpha splice variant 1 | Homo sapiens | 9 |
| GenBank NM_181054 | HIF-1 alpha splice variant 2 | Homo sapiens | 10 |
| GenBank NM_024359 | HIF-1 alpha | Rattus norvegicus | 11 |
| GenBank NM_010431 | HIF-1 alpha | Mus musculus | 12 |
| GenBank XM_049518 | ICAM-1 (inter-cellular adhesion | Homo sapiens | 13 |
| | molecule 1) | | |
| GenBank NM_010493 | ICAM-1 | Mus musculus | 14 |
| GenBank AY124380 | Ang1 (angiopoeitin 1) | Homo sapiens | 15 |
| GenBank AY121504 | Ang1 splice variant | Homo sapiens | 16 |
| GenBank AF345932 | Ang1 | Canis familiaris | 17 |
| GenBank NM_00147 | Ang2 (angiopoeitin 2) | Homo sapiens | 18 |
| GenBank AF187858 | Ang2 splice variant | Homo sapiens | 19 |
| GenBank NM_007426 | Ang2 | Mus musculus | 20 |
| GenBank L06139 | Tie2 (tyrosine kinase with | Homo sapiens | 21 |
| | immunoglobulin and epidermal | | |
| | growth factor homology domains 2) | | |
| GenBank AB086825 | Tie2 splice variant | Homo sapiens | 22 |
| GenBank AX398356 | Tie2 mutant | Homo sapiens | 23 |
| GenBank NM_013690 | Tie2 | Mus musculus | 24 |
| GenBank NW_043856 | Tie2 | Rattus norvegicus | 25 |

¹All documents listed in Table 1 are herein incorporated by reference in their entirety.

[0051] Anti-angiogenic genes include those listed in Table 2. The nucleic acid sequences encoding the corresponding anti-angiogenic factors and the amino acid sequences of these factors, are given in the sequence listing as indicated in Table 2. Table 2 and the nucleic acid and amino acid sequences referred to therein are adapted from information provided on the website maintained by InvivoGen (San Diego, Calif. 92121).

TABLE 2
Anti-Angiogenic Factors

| | | | SEQ ID NO: | |
|---|---|---|---|---|
| Reference² | Anti-Angiogenic Gene | Organism | nucleotide | protein |
| Jones N et al. (2001), Nat Rev | Ang2 (Angiopoietin-2) | Homo sapiens | 26 | 27 |
| Mol Cell Biol 2(4): 257-67 | | Mus musculus | 28 | 29 |
| Tanaka T et al. | Angiostatin (internal fragment | Homo sapiens | 30 | 31 |
| (1998), Cancer Res 58: | of human plasminogen) | Mus musculus | 32 | 33 |
| 3362-3369. | | | | |
| O'Reilly et al. (1999), | AntiThrombin-3 | Homo sapiens | 34 | 35 |
| Science 285: 1926-1928. | | Mus musculus | 36 | 37 |
| Hong L et al (1999), Hum | ATF (Amino-terminal fragment | Homo sapiens | 38 | 39 |
| Gene Ther 10: 3045-3053. | of Urokinase) | Mus musculus | 40 | 41 |
| Pike S E et al. (1999), | Calreticulin and Calreticulin | Homo sapiens | 42 | 43 |
| Blood 94(7): 2461-8 | fragments | Mus musculus | 44 | 45 |
| Sasaki T et al. (2000), | Endostatin XV (collagen XV C- | Homo sapiens | 46 | 47 |
| J Mol Biol | term fragment) | Mus musculus | 48 | 49 |
| 301(5): 1179-90 | Endostatin VIII (collagen XVIII | Homo sapiens | 50 | 51 |
| | C-term fragment) | Mus musculus | 52 | 53 |
| Sgadari, S et al. (1996), | IP-10 (Interferon-alpha | Homo sapiens | 54 | 55 |
| Proc Natl Acad Sci USA 93: | Inducible Protein 10) | | | |
| 13791-13796 | | Mus musculus | 56 | 57 |
| Cao R et al. (1999), Proc | K1-5 (The 5 Kringle domains of | Homo sapiens | 58 | 59 |
| Natl Acad Sci USA 96: | human plasminogen) | Mus musculus | 60 | 61 |
| 5728-33 | | | | |
| Ji W R et al. (1998), Biochem | Kringle-5 domain of human | Homo sapiens | 62 | 63 |
| Biophys Res Commun | plasminogen | | | |
| 247: 414-419. | | | | |
| Zhang M et al. (2000), Nat Med | Maspin (Mammary serine | Mus musculus | 64 | 65 |
| 6: 196-9 | protease inhibitor or PI5) | | | |
| Sgadari C et al. (1997), Blood | Mig/CXCL9 (Monokine- | Homo sapiens | 66 | 67 |
| 89: 2635-2643 | induced by Interferon-gamma) | Mus musculus | 68 | 69 |
| Dawson D W et al. (1999), | PEDF (Pigment Epithelium- | Homo sapiens | 70 | 71 |
| Science 285: 245-8 | Derived Factor) | Mus musculus | 72 | 73 |
| Brooks P C et al. (1998), Cell | PEX (C-term hemopexin | Homo sapiens | 74 | 75 |
| 92: 391-400 | domain of MMP-2) | Mus musculus | 76 | 77 |
| Tanaka T et al. (1997), Nat Med | CXCL4 (Platelet Factor 4) | Homo sapiens | 78 | 79 |
| 3: 437-442. | | Mus musculus | 80 | 81 |
| Bengtson N W et al. (2000), Mol | PRP (Proliferin-Related | Mus musculus | 82 | 83 |
| Endocrinol 14: 1934-43 | Protein) | | | |
| Martin D C (1996), | TIMP-1 (Tissue inhibitor of | Homo sapiens | 84 | 85 |
| Oncogene 13: 569-576. | metalloproteinase-1) | Mus musculus | 86 | 87 |
| Valente P et al. (1998), Int J | TIMP-2 (Tissue inhibitor of | Homo sapiens | 88 | 89 |
| Cancer 75: 246-253 | metalloproteinase-2) | | | |
| Spurbeck W W et al. (2003), | TIMP-3 (Tissue inhibitor of | Homo sapiens | 90 | 91 |
| Cancer Gene Therapy 10: | metalloproteinase-3) | Mus musculus | 92 | 93 |
| 161-167 | | | | |
| Greene J et al. (1996), J Biol | TIMP-4 (Tissue inhibitor of | Homo sapiens | 94 | 95 |
| Chem 271: 30375-30380 | metalloproteinase-4) | | | |
| Moses M A. (1999), Proc | Troponin I-2 (fast-twitch | Homo sapiens | 96 | 97 |
| Natl Acad Sci USA 96: | skeletal muscle) | Mus musculus | 98 | 99 |
| 2645-2650 | | | | |
| Wakasugi K et al. (2002), Proc | T2-TrpRs (Ser94-Gln471 | Homo sapiens | 100 | 101 |
| Natl Acad Sci USA 99: 173-7 | fragment of Tryptophanyl- | | | |
| | tRNA synthetase) | | | |
| Iruela-Arispe M L et al. (1999), | TSP-1 (Thrombospondin-1) | Homo sapiens | 102 | 103 |
| Circulation 100: 1423-31 | | | | |
| Maeshima Y. et al. (2001), | Tumstatin (Collagen IV | Homo sapiens | 104 | 105 |
| J Biol Chem 276: 15240-8 | fragment; NC1 domain of | | | |
| | alpha-3 chain) | | | |

²All documents listed in Table 2 are herein incorporated by reference in their entirety.

[0052] According to the present invention, expression of pro-angiogenic genes is reduced in target cells by inducing RNAi-mediated destruction of mRNA produced from one or more pro-angiogenic genes. For example, the expression of VEGF gene, or a VEGF gene and a HIF-1 alpha gene, can be reduced in a target cell by RNAi. The expression of other combinations of pro-angiogenic genes can also be reduced in a target cell by RNAi; for example, the expression of VEGF/Ang2; VEGF/ICAM-1; or VEGF/HIF-1 alpha/Ang2 can be reduced.

[0053] RNAi can be induced in a target cell by treating that cell with an isolated double-stranded RNA (“dsRNA”) molecule which has at least about 90%, for example about 95%, about 98%, about 99% or about 100%, sequence homology with at least a portion of the mRNA produced from the pro-angiogenic gene. The dsRNA molecule can be any size which induces RNAi of the pro-angiogenic gene in a target cell, but is preferably between about 15 base pairs to about 500 base pairs in length. In a particularly preferred embodiment, the dsRNA molecule is a “short or small interfering RNA” or “siRNA.”

[0054] As used herein, an “isolated” molecule is a molecule which is synthetic, or which is altered or removed from the natural state through human intervention. For example, a dsRNA or protein naturally present in a living animal is not “isolated,” but a synthetic dsRNA or protein, or a dsRNA or protein which is partially or completely separated from the coexisting materials of its natural state, is “isolated.” An isolated dsRNA or protein can exist in substantially purified form, or can exist in a non-native environment such as, for example, a cell into which the dsRNA or protein has been introduced. Molecules which are produced inside a cell by natural processes, but which are produced from an “isolated” precursor molecule, are also considered to be “isolated” molecules. For example, an isolated dsRNA or protein can be introduced into a target cell, where it is processed by the Dicer protein (or its equivalent) into siRNA. The siRNA produced from the original isolated dsRNA inside the cell are considered isolated molecules for purposes of the present invention. RNA transcripts and/or protein produced from an expression vector inside a cell are also considered to be “isolated” molecules.

[0055] As used herein, a target cell is “treated” a with a dsRNA molecule when that dsRNA molecule is introduced into a target cell. A dsRNA can be introduced into a target cell by any suitable molecular biology technique, including direct administration to the cells, administration in conjunction with a nucleic acid delivery reagent, or transfection of the cell with an expression vector comprising nucleic acid sequences encoding the dsRNA molecule. Techniques for introducing dsRNA into target cells, including the construction and use of expression vectors for introducing the dsRNA, are discussed in more detail below.

[0056] siRNA useful in the present methods can comprise short double-stranded RNA from about 17 nucleotides to about 29 nucleotides in length, preferably from about 19 to about 25 nucleotides in length, particularly preferably 21 nucleotides in length. The siRNA are targeted to mRNA produced from cellular factor genes such as pro-angiogenic or anti-apoptotic genes. The mRNA produced from such cellular factor genes is also referred to herein as “target mRNA.”

[0057] The siRNA comprise a sense RNA strand and a complementary antisense RNA strand annealed together by standard Watson-Crick base-pairing interactions (hereinafter “base-paired”). The sense strand comprises a nucleic acid sequence which is substantially identical to a target sequence contained within the target mRNA.

[0058] As used herein, a nucleic acid sequence in an siRNA which is “substantially identical” to a target sequence contained within the target mRNA is a nucleic acid sequence which is identical to the target sequence, or which differs from the target sequence by one, two or more nucleotides. siRNA comprising sense strands which comprise nucleic acid sequences that are “substantially identical” to a target sequence are characterized in that they induce RNAi-mediated degradation of mRNA containing the target sequence. For example, an siRNA of the invention can comprise a sense strand comprising nucleic acid sequences which differ from a target sequence (e.g., by one or two nucleotides), provided that RNAi-mediated degradation of the target mRNA is induced by the siRNA.

[0059] The sense and antisense strands of the siRNA can comprise two complementary, single-stranded RNA molecules, or can comprise a single molecule in which two complementary portions are base-paired and are covalently linked by a single-stranded “hairpin” area. Without wishing to be bound by any theory, it is believed that the hairpin area of the latter type of siRNA molecule is cleaved intracellularly by the Dicer protein (or its equivalent) to form an siRNA of two individual base-paired RNA molecules. The siRNA can also contain alterations, substitutions or modifications of one or more ribonucleotide bases. For example, the siRNA can be altered, substituted or modified to contain one or more deoxyribonucleotide bases.

[0060] The siRNA of the invention can comprise partially purified RNA, substantially pure RNA, synthetic RNA, or recombinantly produced RNA, as well as altered RNA that differs from naturally-occurring RNA by the addition, deletion, substitution and/or alteration of one or more nucleotides. Such alterations can include addition of non-nucleotide material, such as to the end(s) of the siRNA or to one or more internal nucleotides of the siRNA; or modifications that make the siRNA more resistant to nuclease digestion. Suitable modifications to increase the nuclease resistance of the present siRNA include the use of 2′-OH substituted ribonucleotides, such as 2′-O-alkylated (e.g., 2′-O-methylated) or 2′-halogenated (e.g., F, Cl, Br, or I) ribonucleotides; modifications to the sugar phosphate backbone (e.g., phoshporothioate, phosphorodithioate, and methylphosphonate linkages); or the substitution of one or more nucleotides in the siRNA with deoxyribonucleotides. Modifications that make the siRNA resistant to nuclease digestion are known in the art; see, e.g., US 2003/0206887 to Morissey et al., the entire disclosure of which is herein incorporated by reference. The siRNA of the invention which are exposed to serum, lachrymal fluid or other nuclease-rich environments, or which are delivered topically (e.g., by eyedropper), are preferably modified to increase their resistance to nuclease digestion.

[0061] One or both strands of the siRNA of the invention can also comprise a 3′ overhang. As used herein, a “3′ overhang” refers to at least one unpaired nucleotide extending from the 3′-end of a duplexed RNA strand.

[0062] Thus in one embodiment, the siRNA comprises at least one 3′ overhang of from 1 to about 6 nucleotides (which can include ribonucleotides or deoxyribonucleotides) in length, preferably from 1 to about 5 nucleotides in length, more preferably from 1 to about 4 nucleotides in length, and particularly preferably from about 2 to about 4 nucleotides in length.

[0063] In the embodiment in which both strands of the siRNA molecule comprise a 3′ overhang, the length of the overhangs can be the same or different for each strand. In a most preferred embodiment, the 3′ overhang is present on both strands of the siRNA, and is 2 nucleotides in length. For example, each strand of the siRNA can comprise 3′ overhangs of dithymidylic acid (“TT”) or diuridylic acid (“uu”).

[0064] In order to enhance the stability of the present siRNA, the 3′ overhangs can be also stabilized against degradation. In one embodiment, the overhangs are stabilized by including purine nucleotides, such as adenosine or guanosine nucleotides. Alternatively, substitution of pyrimidine nucleotides by modified analogues; e.g., substitution of uridine nucleotides in the 3′ overhangs with 2′-deoxythymidine, is tolerated and does not affect the efficiency of RNAi degradation. In particular, the absence of a 2′ hydroxyl in the 2′-deoxythymidine significantly enhances the nuclease resistance of the 3′ overhang in tissue culture medium.

[0065] In certain embodiments, the siRNA comprise the sequence AA(N19)TT (SEQ ID NO: 1738) or NA(N21), where N is any nucleotide. These siRNA comprise approximately 30-70% G/C, and preferably comprise approximately 50% G/C. The sequence of the sense siRNA strand corresponds to (N19)TT or N21 (i.e., positions 3 to 23), respectively. In the latter case, the 3′ end of the sense siRNA is converted to TT. The rationale for this sequence conversion is to generate a symmetric duplex with respect to the sequence composition of the sense and antisense strand 3′ overhangs. The antisense strand is then synthesized as the complement to positions 1 to 21 of the sense strand.

[0066] Because position 1 of the 23-nt sense strand in these embodiments is not recognized in a sequence-specific manner by the antisense strand, the 3′-most nucleotide residue of the antisense strand can be chosen deliberately. However, the penultimate nucleotide of the antisense strand (complementary to position 2 of the 23-nt sense strand in either embodiment) is generally complementary to the targeted sequence.

[0067] In another embodiment, the siRNA can comprise the sequence NAR(N17)YNN, where R is a purine (e.g., A or G) and Y is a pyrimidine (e.g., C or U/T). The respective 21-nt sense and antisense strands of this embodiment therefore generally begin with a purine nucleotide. Such siRNA can be expressed from pol III expression vectors without a change in targeting site, as expression of RNAs from pol III promoters is only believed to be efficient when the first transcribed nucleotide is a purine.

[0068] The siRNA can be targeted to any stretch of approximately 19-25 contiguous nucleotides in any of the target mRNA sequences (the “target sequence”). Techniques for selecting target sequences for siRNA are given, for example, in Tuschl T et al., “The siRNA User Guide,” revised Oct. 11, 2002, the entire disclosure of which is herein incorporated by reference. “The siRNA User Guide” is available on the world wide web at a website maintained by Dr. Thomas Tuschl, Department of Cellular Biochemistry, AG 105, Max-Planck-Institute for Biophysical Chemistry, 37077 Göttingen, Germany, and can be found by accessing the website of the Max Planck Institute and searching with the keyword “siRNA.” Thus, the sense strand of the present siRNA comprises a nucleotide sequence identical to any contiguous stretch of about 19 to about 25 nucleotides in the target mRNA.

[0069] Generally, a target sequence on the target mRNA can be selected from a given cDNA sequence corresponding to the target mRNA, preferably beginning 50 to 100 nucleotides downstream (i.e., in the 3′ direction) from the start codon. The target sequence can, however, be located in the 5′ or 3′ untranslated regions, or in the region nearby the start codon. For example, a suitable target sequence in the human VEGF₁₂₁ mRNA sequence is (represented as cDNA):

(SEQ ID NO:106)

TCATCACGAAGTGGTGAAG

[0070] Thus, an siRNA targeting this sequence, and which has 3′ uu overhangs on each strand (overhangs shown in bold), is:

(SEQ ID NO:107)

5′-ucaucacgaaguggugaaguu-3′

(SEQ ID NO:108)

3′-uuaguagugcuucaccacuuc-5′

[0071] An siRNA targeting this same sequence, but having 3′ TT overhangs on each strand (overhangs shown in bold) is:

(SEQ ID NO:109)

5′-ucaucacgaaguggugaagTT-3′

(SEQ ID NO:110)

3′-TTaguagugcuucaccacuuc-5′

[0072] Representative target sequences for the pro-angiogenic genes listed above, from which siRNA of the invention can be derived, are given in the sequence listing. For example, representative target sequences for human VEGF are given in SEQ ID NOS. 111-183. Representative target sequences for human HIF-1 alpha are given in SEQ ID NOS. 184-458. Representative target sequences for human Flt-1 and Flk-1/KDR are given in SEQ ID NOS. 459-872 and 873-1232, respectively. Representative target sequences for human ICAM-1 are given in SEQ ID NOS. 1233-1307. Representative target sequences for human Ang1 are given in SEQ ID NOS. 1308-1503. Representative target sequences for human Ang2 are given in SEQ ID NOS. 1504-1703. The construction of siRNA comprising these target sequences is within skill in the art.

[0073] The dsRNA for use in the present methods can be obtained using techniques within the skill in the art. For example, dsRNA can be chemically synthesized using appropriately protected ribonucleoside phosphoramidites and a conventional DNA/RNA synthesizer. dsRNA can also be produced from an expression vector, as discussed in more detail below. siRNA can also be chemically synthesized or recombinantly produced using methods known in the art, such as the Drosophila in vitro system described in U.S. published application 2002/0086356 of Tuschl et al., the entire disclosure of which is herein incorporated by reference. dsRNA can be synthesized as two separate, complementary RNA molecules, or as a single RNA molecule with two complementary regions. Commercial suppliers of synthetic RNA molecules or synthesis reagents include Proligo (Hamburg, Germany), Dharmacon Research (Lafayette, Colo., USA), Pierce Chemical (part of Perbio Science, Rockford, Ill., USA), Glen Research (Sterling, Va., USA), ChemGenes (Ashland, Mass., USA) and Cruachem (Glasgow, UK).

[0074] Preferably, the dsRNA (in particular siRNA) are expressed from recombinant circular or linear DNA expression vectors. As used herein, “expression vectors” are constructs that comprise suitable nucleic acid sequences for expression of dsRNA. Preferably, the expression vector comprises a plasmid vector. However, the expression vector can be any construct suitable for introduction into a prokaryotic or eukaryotic cell which is known in the art, for example a cosmid, artificial chromosome or viral vector.

[0075] Construction of expression vectors for expressing dsRNA is within the skill in the art, as exemplified by J. Sambrook et al., Molecular Cloning, A Laboratory Manual (2d Ed. 1989) (Cold Spring Harbor Laboratory). For example, nucleic acid sequences comprising the various components of an expression vector can be introduced consecutively by restriction enzyme cleavage of an appropriate base vector, and insertion of the component into the restriction site of the vector. After ligation and cloning of the components into the base vector to form the expression vector, the expression vector can be replicated in a appropriate host cell and isolated for further use.

[0076] Particularly preferred are bacterial plasmid expression vectors which utilize regulatory systems compatible with E. coli or other bacterial strains. For example, E. coli can be transformed using derivatives of pBR322, a plasmid derived from an E. coli species by Bolivar et al. (1977), Gene 2: 95. Plasmid pBR322 contains genes for ampicillin and tetracycline resistance, and thus provides multiple selectable markers which can be either retained or destroyed in constructing the desired vector. Other suitable plasmid vectors include plasmids pUC9-TSF11 and pUC9delH3-pTSF-3. These plasmids are derived from pUC9 (Messing and Vieira (1982), Gene 19: 259-268), which contains parts of pBR322.

[0077] Commonly used prokaryotic regulatory sequences suitable for constructing plasmid vectors include bacterial promoters for transcription initiation, optionally with an operator, and ribosome binding site sequences. Commonly used promoters include the lactamase (penicillinase) and lactose (lac) promoter systems (Chang et al. (1977), Nature 198: 1056); the tryptophan (trp) promoter system (Goeddel et al. (1980), Nucl. Acids Res. 8: 4057); the lambda-derived P_{L} promoter (Shimatake et al. (1981), Nature 292: 128); and the trp-lac (trc) promoter system (Amann and Brosius (1985), Gene 40: 183), the entire disclosures of which are herein incorporated by reference.

[0078] Other components for constructing suitable plasmid vectors are available, typically carried in other plasmids. These components can be excised from their source plasmids and ligated together with the nucleic acid sequence of interest, using standard restriction and ligation procedures.

[0079] Commercially available plasmid vectors are suitable for use in the invention; for example, the plasmids pBLAST (and its derivatives such as pBLAST40, pBLAST45 and pBLAST49); pORF and pORF9 (see FIGS. 1A-1C) can be obtained from InvivoGen (San Diego, Calif. 92121). The pBLAST plasmids contain an EF-1a composite promoter that consists of the elongation factor 1 alpha core promoter fused to the 5′ UTR of the HTLV or eIF4G gene. The composite promoter in the pBLAST plasmids yield high levels of gene expression in a wide variety of cell lines. The pORF plasmid contains the EF-1a/HTLV composite promoter in tandem with a bacterial promoter within an intron called 1117. The pORF9 plasmid contains the EF-1a/HTLV composite promoter and no bacterial promoter. Nucleic acid sequences to be expressed (indicated as “insert” in FIGS. 1A-1C) can be inserted into the multiple cloning sites of these vectors (see FIGS. 1A-1C) using standard molecular biology techniques such as site-specific nucleic acid cleavage and ligation.

[0080] Site-specific nucleic acid cleavage, or restriction, is generally performed by treating nucleic acid sequences with suitable restriction enzyme(s) under conditions well-known in the art. Moreover, suitable reaction conditions for a given restriction enzyme are typically specified by the manufacturer of commercially available restriction enzymes. See, e.g., New England Biolabs Product Catalog, 2001.

[0081] In general, about 1 microgram of plasmid or nucleic acid sequence is cleaved by one unit of restriction enzyme in about 20 microliter of buffer solution. An excess of restriction enzyme is often used to insure complete digestion of the nucleic acid substrate. Incubation times of about one hour to two hours at about 37° C. are generally used, although variations can be tolerated, and certain restriction enzymes require higher or lower incubation temperatures.

[0082] After each incubation, restriction enzyme can be inactivated and removed from the nucleic acid sequence by extraction with phenol/chloroform, optionally followed by ether extraction, and the nucleic acid recovered from aqueous fraction by precipitation with 2 to 2½ volumes of ethanol. If desired, size separation of the cleaved nucleic acid fragments may be performed by polyacrylamide or agarose gel electrophoresis using standard techniques. A general description of size separation techniques is found in Methods in Enzymology (1980), 65: 499-560, the entire disclosure of which is herein incorporated by reference.

[0083] Many restriction enzymes leave single-stranded overhangs after cleavage of nucleic acid sequences. Nucleic acid fragments with single-stranded overhangs may be ligated with sequences containing complementary overhangs (so called “sticky-end” ligation), or may be “blunt ended” for subsequent ligation with other blunt-ended nucleic acid sequences.

[0084] Nucleic acid fragments may be “blunt-ended” by, for example, incubation with the large fragment of E. coli DNA polymerase I (Klenow fragment) in the presence of the four deoxyribonucleotide triphosphates (dNTPs), using incubation times of about 15 to 25 min. at 20 to 25° C. in 50 mM Tris pH 7.6, 50 mM NaCl, 6 mM MgCl₂, 6 mM DTT and 0.1-1.0 mM dNTPs. The Klenow fragment fills in 5′ single-stranded overhangs, but “chews back” protruding 3′ single strands. After treatment with Klenow fragment, the reaction mixture containing the blunt-ended nucleic acid fragments is extracted with phenol/chloroform and ethanol precipitated. Treatment under appropriate conditions with S1 nuclease or BAL-31 results in hydrolysis of any remaining single-stranded portions.

[0085] Ligation of nucleic acid sequences can be performed in 15-50 microliter volumes under the following standard conditions and temperatures, for example, 20 mM Tris-HCl pH 7.5, 10 mM MgCl₂, 10 mM DTT, 33 microgram/ml BSA, 10 mM-50 mM NaCl, and either 40 micromolar ATP, 0.01-0.02 (Weiss) units T4 DNA ligase at 0° C. (for “sticky end” ligation) or 1 mM ATP, 0.3-0.6 (Weiss) units T4 DNA ligase at 14° C. (for “blunt end” ligation). Intermolecular “sticky end” ligations are typically performed at 33-100 micrograms/ml total DNA concentrations (5-100 nM total end concentration). Intermolecular blunt end ligations are typically performed at 1 micromolar total ends concentration.

[0086] To avoid unwanted self-ligation of the vector, fragments of nucleic acids used for vector construction are commonly treated with bacterial alkaline phosphatase (BAP) or calf intestinal alkaline phosphatase (CIP) in order to remove the 5′ phosphates. Phosphatase reactions are typically conducted at pH 8 in approximately 10 mM Tris-HCl, 1 mM EDTA using about 1 unit of BAP or CIP per microgram of vector, at 60° C. for about one hour. Phosphatased nucleic acid fragments can be recovered by extraction with phenol/chloroform and ethanol precipitation as described above.

[0087] To verify correct construction of the plasmid vector, plasmids are transfected into a suitable host, amplified, extracted, and analyzed by sequence and/or restriction analysis as is known in the art. For example, any E. coli strain or other suitable host may be transfected with the finished plasmid according to known techniques. Successful transfectants are selected by ampicillin, tetracycline or other antibiotic resistance (or with other appropriate markers), as is understood in the art.

[0088] Expression vectors can be extracted from the transfectants according to known methods, for example the method of Clewell et al. (1969), Proc. Natl. Acad. Sci. (USA) 62: 1159, optionally following chloramphenicol amplification (see Clewell (1972), J. Bacteriol. 110: 667). See also Holmes et al. (1981), Anal. Biochem. 114: 193-197 and Bimboim et al. (1979), Nucl. Acids Res. 7: 1513-1523, the entire disclosures of which are herein incorporated by reference. Commercially available nucleic acid “mini-preps” can also be used, such as are available from Qiagen, Boehringer Mannheim, Stratagene, Invitrogen, and others.

[0089] Isolated expression vectors can be analyzed, for example, by hybridization to appropriate radiolabeled probes in a “dot blot” analysis (e.g., as described by Kafatos et al. (1977), Nucl. Acid Res. 7: 1541-1552); restriction enzyme analysis; or by nucleic acid sequencing (e.g., via the dideoxy nucleotide method of Sanger et al. (1977), Proc. Natl. Acad. Sci. (USA) 74: 5463, as further described by Messing et al. (1981), Nucl. Acids Res. 9: 309, or the method of Maxam et al. (1980), Methods in Enzymology 65: 499), the entire disclosures of which are herein incorporated by reference.

[0090] Both prokaryotic and eukaryotic systems can be used to express nucleic acid sequences encoding the dsRNA. Prokaryotic hosts are preferred, for example various strains of E. coli. However, other microbial strains may also be used. Plasmid vectors which contain replication sites, selectable markers and regulatory sequences derived from a species compatible with the host are preferred.

[0091] In addition to bacteria, eukaryotic microbes such as yeast can also be used as hosts. Laboratory strains of Saccharomyces cerevisiae (Baker's yeast) are preferred, although a number of other strains or species are commonly available. Vectors employing, for example, the 2μ origin of replication described in Broach (1983), Meth. Enz. 101: 307, or other yeast compatible origins of replication (see, for example, Stinchcomb et al. (1979), Nature 282: 39; Tschumper et al. (1980), Gene 10: 157; and Clarke et al. (1983), Meth. Enz. 101: 300) can be used. Regulatory sequences for yeast vectors include promoters for the synthesis of glycolytic enzymes (see Hess et al. (1968), J. Adv. Enzyme Reg. 7:1 49 and Holland et al. (1978), Biochemistry 17: 4900). Additional promoters known in the art include the promoter for 3-phosphoglycerate kinase (Hitzeman et al. (1980), J. Biol. Chem. 255: 2073). Other suitable yeast promoters, which have the additional advantage of transcription controlled by growth conditions and/or genetic background, include the promoter regions for alcohol dehydrogenase 2, isocytochrome C, acid phosphatase, degradative enzymes associated with nitrogen metabolism, the alpha factor system and enzymes responsible for maltose and galactose utilization. For yeast hosts, terminator sequences are desirable at the 3′ end of the coding sequences. Such terminators are found in the 3′ untranslated region following the coding sequences in yeast-derived genes. The disclosures of all citations in this paragraph are herein incorporated by reference in their entirety.

[0092] It is also possible to express nucleic acid sequences in eukaryotic host cell cultures derived from multicellular organisms. See, for example, U.S. Pat. No. 4,399,216 of Axel et al., the entire disclosure of which is herein incorporated by reference. These systems have the ability to splice out introns, and thus can be used directly to express genomic fragments. However, non-genomic (e.g., cDNA) sequences can also be expressed.

[0093] Useful mammalian host cell lines include VERO, HeLa, human embryonic kidney (HEK), baby hamster kidney (BHK), CV-1, COS (e.g., COS-7), MDCK, NIH 3T3, and Chinese hamster ovary (CHO) cell lines. Expression vectors for such cells preferably comprise promoters and regulatory sequences compatible with mammalian cells such as, for example, the SV40 early and late promoters (Fiers et al. (1978), Nature 273: 113), or other viral promoters such as those derived from polyoma, adenovirus, adeno-associated virus, bovine papilloma, or avian sarcoma viruses. The controllable promoter hMTII (Karin et al. (1982), Nature 299: 797-802) can also be used. The disclosures of all citations in this paragraph are herein incorporated by reference in their entirety.

[0094] Depending on the host cell used, transfection of the expression vector is accomplished using standard techniques appropriate to the cell. The calcium treatment employing calcium chloride, as described by Cohen (1972), Proc. Natl. Acad. Sci. USA 69: 2110, or the RbCl₂ method described in Maniatis et al., Molecular Cloning: A Laboratory Manual (1982), Cold Spring Harbor Press, p. 254 and Hanahan (1983), J. Mol. Biol. 166: 557-580, can be used for prokaryotes or other cells which contain substantial cell wall barriers. For cells without such cell walls (i.e., eukaryotic; for example mammalian cells), the calcium phosphate precipitation method of Graham and van der Eb (1978), Virology 52: 546, optionally as modified by Wigler et al. (1979), Cell 16: 777-785 can be used. Transformations into yeast can be carried out according to the method of Beggs (1978), Nature 275: 104-109. The disclosures of all citations in this paragraph are herein incorporated by reference in their entirety.

[0095] The desired nucleic acid coding sequence for insertion into a plasmid vector can be retrieved from available cDNA or genomic DNA libraries, or from available plasmids. Alternatively, the desired nucleic acid coding sequence can be synthesized in vitro starting from the individual nucleoside derivatives. For example, nucleic acid sequences of sizeable length, e.g., 500-1000 base pairs, can be prepared by synthesizing individual overlapping complementary oligonucleotides and filling in single stranded non-overlapping portions using DNA polymerase in the presence of the deoxyribonucleotide triphosphates. This approach has been used successfully in the construction of several genes of known sequence. See, for example, Edge (1981), Nature 292: 756; Nambair et al. (1984), Science 223: 1299; and Jay (1984), J. Biol. Chem. 259: 6311. The disclosures of all citations in this paragraph are herein incorporated by reference in their entirety.

[0096] Synthetic nucleic acid sequences can be prepared by, for example, the phosphotriester method as described in Edge et al., supra, and Duckworth et al. (1981), Nucl. Acids Res. 9: 1691; or the phosphoramidite method as described in Beaucage and Caruthers (1981), Tet. Letts. 22: 1859 and Matteucci and Caruthers (1981), J. Am. Chem. Soc. 103: 3185. The nucleic acid sequences can also be prepared using commercially available automated oligonucleotide synthesizers. The disclosures of all citations in this paragraph are herein incorporated by reference in their entirety.

[0097] Once obtained, expression vectors encoding one or more dsRNA of the invention can be delivered into target cells using techniques within the skill in the art. See, for example Tuschl, T. (2002), Nat. Biotechnol, 20: 446-448; Brummelkamp T R et al. (2002), Science 296: 550-553; Miyagishi M et al. (2002), Nat. Biotechnol. 20: 497-500; Paddison P J et al. (2002), Genes Dev. 16: 948-958; Lee N S et al. (2002), Nat. Biotechnol. 20: 500-505; and Paul C P et al. (2002), Nat. Biotechnol. 20: 505-508, the entire disclosures of which are herein incorporated by reference.

[0098] In one embodiment, the expression vector is a recombinant plasmid expression vector encoding one or more siRNA. For each siRNA expressed, the expression vector comprises a sense RNA strand coding sequence in operable connection with a polyT termination sequence under the control of a human U6 RNA promoter, and an antisense RNA strand coding sequence in operable connection with a polyT termination sequence under the control of a human U6 RNA promoter. As used herein, “in operable connection with a polyT termination sequence” means that the nucleic acid sequences encoding the sense or antisense strands are immediately adjacent to the polyT termination signal in the 5′ direction. During transcription of the sense or antisense sequences from the plasmid, the polyT termination signals act to terminate transcription. As used herein, “under the control” of a promoter means that the nucleic acid sequences encoding the sense or antisense strands are located 3′ of the promoter, so that the promoter can initiate transcription of the sense or antisense coding sequences. Other promoters suitable for expressing siRNA include the H1 RNA pol III promoter sequences, the cytomegalovirus promoter, and inducible or regulatable promoters for expression of the siRNA in a particular tissue or in a particular intracellular environment.

[0099] In another embodiment, the expression vector is a recombinant viral vector comprising sequences encoding one or more siRNA and any suitable promoter for expressing the dsRNA sequences. Suitable promoters include, for example, the U6 or H1 RNA pol III promoter sequences and the cytomegalovirus promoter. Selection of other suitable promoters is within the skill in the art. The recombinant viral vectors can also comprise inducible or regulatable promoters for expression of the siRNA in a particular tissue or in a particular intracellular environment.

[0100] Any viral vector capable of accepting the coding sequences for the siRNA molecule(s) to be expressed can be used, for example vectors derived from adenovirus (AV); adeno-associated virus (AAV); retroviruses (e.g., lentiviruses, Rhabdoviruses, murine leukemia virus); herpes virus, and the like. The tropism of the viral vectors can be modified by pseudotyping the vectors with envelope proteins or other surface antigens from other viruses, or by substituting different viral capsid proteins, as appropriate.

[0101] For example, lentiviral vectors of the invention can be pseudotyped with surface proteins from vesicular stomatitis virus (VSV), rabies, Ebola, Mokola, and the like. AAV vectors of the invention can be made to target different cells by engineering the vectors to express different capsid protein serotypes. For example, an AAV vector expressing a serotype 2 capsid on a serotype 2 genome is called AAV 2/2. This serotype 2 capsid gene in the AAV 2/2 vector can be replaced by a serotype 5 capsid gene to produce an AAV 2/5 vector. Techniques for constructing AAV vectors which express different capsid protein serotypes are within the skill in the art; see, e.g., Rabinowitz J E et al. (2002), J Virol 76:791-801, the entire disclosure of which is herein incorporated by reference.

[0102] Selection of recombinant viral vectors suitable for use in the invention, methods for inserting nucleic acid sequences for expressing the siRNA into the vector, and methods of delivering the viral vector to the cells of interest are within the skill in the art. See, for example, Domburg R (1995), Gene Therap. 2: 301-310; Eglitis M A (1988), Biotechniques 6: 608-614; Miller A D (1990), Hum Gene Therap. 1: 5-14; and Anderson W F (1998), Nature 392: 25-30, the entire disclosures of which are herein incorporated by reference.

[0103] Preferred viral vectors are those derived from AV and AAV. In a particularly preferred embodiment, the siRNA of the invention is expressed as two separate, complementary single-stranded RNA molecules from a recombinant AAV vector comprising, for example, either the U6 or H1 RNA promoters, or the cytomegalovirus (CMV) promoter.

[0104] A suitable AV vector for expressing the siRNA of the invention, a method for constructing the recombinant AV vector, and a method for delivering the vector into target cells, are described in Xia H et al. (2002), Nat. Biotech. 20: 1006-1010, the entire disclosure of which is herein incorporated by reference.

[0105] Suitable AAV vectors for expressing the siRNA of the invention, methods for constructing the recombinant AAV vector, and methods for delivering the vectors into target cells are described in Samulski R et al. (1987), J. Virol. 61: 3096-3101; Fisher K J et al. (1996), J. Virol, 70: 520-532; Samulski R et al. (1989), J. Virol. 63: 3822-3826; U.S. Pat. No. 5,252,479; U.S. Pat. No. 5,139,941; International Patent Application No. WO 94/13788; and International Patent Application No. WO 93/24641, the entire disclosures of which are herein incorporated by reference.

[0106] In the practice of the present method, target cells are treated with one or more isolated dsRNA comprising a target sequence for a cellular factor, such as a pro-angiogenic gene. Target cells include any cell which produces pro- and anti-angiogenic factors, particularly cells at or near sites of neovascularization. Suitable target cells include epithelial cells (such as uterine, vascular and retinal pigment epithelial cells) and tumor cells. Preferred target cells are retinal pigment epithelial cells.

[0107] As used herein, a target cell is “treated” with a dsRNA by any technique suitable for exposing the target cells to the dsRNA such that the dsRNA enters the target cell. For example, target cells can be exposed to a dsRNA by administering the dsRNA to a subject as naked RNA or in conjunction with a delivery reagent, or as expression vectors which express the dsRNA. The expression vectors can be administered alone or in combination with a delivery agent. Expression vectors which comprise viral vectors can be delivered into a cell by infecting the target cell according to techniques within the skill in the art.

[0108] Suitable delivery reagents for dsRNA or expression vectors include the Mirus Transit TKO lipophilic reagent; lipofectin; lipofectamine; cellfectin; or polycations (e.g., polylysine), or liposomes. Hereinafter, compounds comprising isolated dsRNA of the invention or comprising expression vectors expressing dsRNA of the invention are referred to as “RNAi compounds.”

[0109] A preferred delivery reagent for RNAi compounds is a liposome. Liposomes can aid in the delivery of RNAi compounds to a particular tissue, such as retinal or tumor tissue, and can also increase the blood half-life of the dsRNA. Liposomes suitable for use in the invention are formed from standard vesicle-forming lipids, which generally include neutral or negatively charged phospholipids and a sterol, such as cholesterol. The selection of lipids is generally guided by consideration of factors such as the desired liposome size and half-life of the liposomes in the blood stream. A variety of methods are known for preparing liposomes, for example as described in Szoka et al. (1980), Ann. Rev. Biophys. Bioeng. 9: 467; and U.S. Pat. Nos. 4,235,871, 4,501,728, 4,837,028, and 5,019,369, the entire disclosures of which are herein incorporated by reference.

[0110] Preferably, the liposomes encapsulating RNAi compounds comprise a ligand molecule that can target the liposome to a particular cell or tissue at or near the site of angiogenesis. Ligands which bind to receptors prevalent in tumor or vascular endothelial cells, such as monoclonal antibodies that bind to tumor antigens or endothelial cell surface antigens, are preferred.

[0111] Particularly preferably, the liposomes encapsulating RNAi compounds are modified so as to avoid clearance by the mononuclear macrophage and reticuloendothelial systems, for example by having opsonization-inhibition moieties bound to the surface of the structure. In one embodiment, a liposome of the invention can comprise both opsonization-inhibition moieties and a ligand.

[0112] The RNAi compounds can be administered to a subject by any suitable parenteral or enteral administration routes. Suitable enteral administration routes include oral, rectal, or intranasal delivery. Suitable parenteral administration routes include intravascular administration (e.g. intravenous bolus injection, intravenous infusion, intra-arterial bolus injection, intra-arterial infusion and catheter instillation into the vasculature); peri- and intra-tissue administration (e.g., peri-tumoral and intra-tumoral injection, intra-retinal injection or subretinal injection); subcutaneous injection or deposition including subcutaneous infusion (such as by osmotic pumps); direct (e.g., topical) application to the area at or near the site of neovascularization, for example by a catheter or other placement device (e.g., a corneal pellet or a suppository, eye-dropper, or an implant comprising a porous, non-porous, or gelatinous material); and inhalation. Suitable placement devices include the ocular implants described in U.S. Pat. Nos. 5,902,598 and 6,375,972, and the biodegradable ocular implants described in U.S. Pat. No. 6,331,313, the entire disclosures of which are herein incorporated by reference. Such ocular implants are available from Control Delivery Systems, Inc. (Watertown, Mass.) and Oculex Pharmaceuticals, Inc. (Sunnyvale, Calif.).

[0113] In a preferred embodiment, injections or infusions of RNAi compounds are given at or near the site of neovascularization. For example, RNAi compounds can be delivered to retinal pigment epithelial cells in the eye. Preferably, RNAi compounds are administered topically to the eye, e.g. in liquid or gel form to the lower eye lid or conjunctival cul-de-sac, as is within the skill in the art (see, e.g., Acheampong A A et al, 2002, Drug Metabol. and Disposition 30: 421-429, the entire disclosure of which is herein incorporated by reference).

[0114] For example, RNAi compounds can be administered topically to the eye in volumes of from about 5 microliters to about 75 microliters, for example from about 7 microliters to about 50 microliters, preferably from about 10 microliters to about 30 microliters. It is understood that topical instillation in the eye of RNAi compounds in volumes greater than 75 microliters can result in loss of dsRNA from the eye through spillage and drainage. The RNAi compounds are highly soluble in aqueous solutions. Thus, it is preferable to administer a high concentration of RNAi compounds (e.g., 100-1000 nM) by topical instillation to the eye in volumes of from about 5 microliters to about 75 microliters.

[0115] A particularly preferred parenteral administration route for RNAi compounds is intraocular administration. It is understood that intraocular administration of the RNAi compounds can be accomplished by injection or direct (e.g., topical) administration to the eye, as long as the administration route allows the RNAi compounds to enter the eye. In addition to the topical routes of administration to the eye described above, suitable intraocular routes of administration include intravitreal, intraretinal, subretinal, subtenon, peri- and retro-orbital, trans-corneal and trans-scleral administration. Such intraocular administration routes are within the skill in the art; see, e.g., and Acheampong A A et al, 2002, supra; and Bennett et al. (1996), Hum. Gene Ther. 7: 1763-1769 and Ambati J et al., 2002, Progress in Retinal and Eye Res. 21: 145-151, the entire disclosures of which are herein incorporated by reference.

[0116] In this embodiment, target cells are also treated to increase the level of at least one anti-angiogenic factor inside the cell. The level of anti-angiogenic factors inside a cell can be increased by up-regulating expression of one or more anti-angiogenic genes located inside the target cell. For example, an anti-angiogenic gene which is already part of the target cell genome can be stimulated to increase production of RNA transcripts from the gene, or by stabilizing the RNA transcripts produced by that gene.

[0117] The level of anti-angiogenic factors inside target cell can also be increased by introducing one or more isolated anti-angiogenic factors directly into target cells, for example by injecting an anti-angiogenic factor into tissue comprised by the target cells, or by administering an anti-angiogenic factor to a subject systemically, so that it is delivered to and taken up by the target cells.

[0118] The anti-angiogenic factors can be modified to facilitate uptake of the anti-angiogenic factors into the target cells. For example, the anti-angiogenic factors can be encapsulated in a liposome prior to being administered to a subject. The encapsulated compounds are delivered directly into the target cells by fusion of the liposome to the cell membrane. Reagents and techniques for encapsulating the present compounds in liposomes are well-known in the art, as described above, and include the ProVectin™ Protein Delivery Reagent from Imgenex.

[0119] The anti-angiogenic factors can also be modified by associating the compounds with a peptide leader sequence known as a “protein transduction domain” or “PTD.” These sequences direct entry of the compound into abnormally proliferating cells by a process known as “protein transduction.” See Schwarze et al. (1999), Science 285: 1569, the entire disclosure of which is herein incorporated by reference.

[0120] PTDs are well-known in the art, and can comprise any of the known PTD sequences, including arginine-rich sequences such as peptides of nine to eleven arginine residues optionally in combination with one to two lysines or glutamines as described in Guis et al. (1999), Cancer Res. 59: 2577-2580, the disclosure of which is herein incorporated by reference. Preferred PTDs are sequences of eleven arginine residues or the NH₂-terminal 11-amino acid protein transduction domain from the human immunodeficiency virus TAT protein. Preferably, the PTD is designed so that it is cleaved from the compound upon entry into the cell. A PTD can be located anywhere on the anti-angiogenic factor that does not disrupt the anti-angiogenic properties of the factor, but is preferably located at the N-terminal end.

[0121] Kits and methods for constructing fusion proteins comprising a protein of interest (e.g., an anti-angiogenic factor) and a PTD are known in the art; for example the TransVector™ system (Q-BIOgene), which employs a 16 amino acid peptide called “Penetratin™” corresponding to the Drosophila antennapedia DNA-binding domain; and the Voyager system (Invitrogen Life Technologies), which uses the 38 kDa VP22 protein from Herpes Simplex Virus-1.

[0122] The level of anti-angiogenic factors inside target cell can also be increased by introducing expression vectors which encode one or more anti-angiogenic factors into the target cell. Expression vectors are described above. The nucleic acid sequences encoding the anti-angiogenic factors referred to in Table 2 can be used to construct expression vectors which express these sequences, using standard molecular biology techniques as discussed above. Preferred expression vectors are plasmids and viral vectors, as described above.

[0123] In one embodiment, expression vectors expressing one or more anti-angiogenic factors is introduced into cells of a subject, so that those cells produce anti-angiogenic factor and secrete it into the vasculature. The secreted anti-angiogenic factor (which is considered to be “isolated”) is then delivered to and taken up by the target cells. For example, an AV or AAV vector expressing an anti-angiogenic factor can be administered to the blood-stream of a subject such that the AV or AAV vector transduces the subject's hepatocytes. The transduced hepatocytes produce the anti-angiogenic factor into the blood-stream. The secreted anti-angiogenic factor can then travel to and be taken up by, for example, RPE cells. Techniques for transducing hepatocytes with AV or AAV vectors are within the skill in the art; see, e.g., Ferry N. et al. (1998), Hum. Gene Ther. 9: 1975, the entire disclosure of which is herein incorporated by reference.

[0124] As used herein, any compound used to increases the level of an anti-angiogenic factor in a target cell is called an “anti-angiogenic compound.” Anti-angiogenic compounds include compounds comprising isolated anti-angiogenic factors, isolated anti-angiogenic factors comprising PTDs, or expression vectors expressing anti-angiogenic factors. As used herein, a target cell is “treated” to increase the level of anti-angiogenic factors by any technique suitable for exposing the target cells to anti-angiogenic compounds, which allows the anti-angiogenic compounds to enter the cell. Target cells can be exposed to the anti-angiogenic compounds through administration to a subject by any suitable enteral or parenteral route, as described above for administering RNAi compounds to a subject.

[0125] In one embodiment, target cells can be treated with an expression vector that expresses an anti-angiogenic factor by administering the expression vector to a subject alone or in combination with a delivery agent, as described above for the RNAi compounds. Expression vectors which comprise viral vectors can be delivered into a target cell by infecting the cell according to techniques within the skill in the art.

[0126] In the practice of the present methods, target cells can be treated with particular combinations of RNAi compounds and anti-angiogenic compounds. For example, target cells can be treated with RNAi compounds which inhibit VEGF gene expression, and with anti-angiogenic compounds that increase the amount of PEDF, endostatin and/or angiostatin in the target cell. Target cells can be treated with RNAi compounds which inhibit HIF-1 alpha gene expression, and with anti-angiogenic compounds that increase the amount of PEDF, endostatin and/or angiostatin in the target cell. Other combinations of RNAi compounds and anti-angiogenic compounds for treating target cells are contemplated.

[0127] In the practice of the present method, RNAi compounds and anti-angiogenic compounds are preferably administered to a subject by the same route. However, RNAi compounds and anti-angiogenic compounds can be administered by different routes. Also, RNAi compounds and anti-angiogenic compounds need not be administered simultaneously, as long as both are ultimately present in the target cells.

[0128] In a preferred embodiment, target cells are treated with a “combination expression vector,” which is a single expression vector that expresses at least one siRNA and at least one gene encoding an anti-angiogenic factor. The combination expression vector comprises nucleic acid sequences encoding the sense and antisense strands of at least one siRNA targeted to a pro-angiogenic gene, and nucleic acid sequences encoding at least one anti-angiogenic factor. Constructing combination expression vectors is within the skill in the art, for example by employing the molecular biology techniques described above. The construction and use of exemplary combination vectors are described in the Examples below. Conveniently, a combination expression vectors can be constructed by inserting nucleic acid sequences encoding the sense and antisense strands of siRNA targeted to a pro-angiogenic gene into the plasmid vectors in FIGS. 1A-1C. It is understood that the combination expression vector is both an “RNAi compound” and an “anti-angiogenic compound.”

[0129] Another exemplary combination expression vector, called pAAVcombo, is shown in FIG. 2. The pAAVcombo vector comprises nucleic acid sequences for expressing one or more cellular factor genes (for example, one or more anti-angiogenic genes) and nucleic acid sequences for expressing one or more dsRNA for reducing expression of other cellular factor genes. As discussed above, any suitable promoter sequences can be used to construct combination expression vectors. The plasmid pAAVcombo also comprises inverted terminal repeats (ITRs) from AAV, which indicates that the vector can be used to produce a recombinant AAV vector of the invention. Similar combination expression vectors can be constructed which comprise components suitable for producing recombinant lentiviral vectors, adenoviral vectors, and the like, as is within the skill in the art.

[0130] The ability of RNAi compounds and anti-angiogenic compounds to cause, respectively, a reduction in pro-angiogenic gene expression and an increase in the level of anti-angiogenic factors in target cells can be evaluated in cell culture systems, using standard techniques for measuring the levels of RNA or protein in cells. For example, the levels of pro-angiogenic factor mRNA in a target cell can be measured by Northern blot or dot blotting techniques, or by quantitative RT-PCR. The level of pro-angiogenic and anti-angiogenic factors in the cultured cells can be measured by techniques such as ELISA or Western blot. Suitable cell culture systems include mouse NIH 3T3 cells, human retinal pigment epithelial cells, HeLa cells and human embryonic kidney (HEK) 293 cells.

[0131] For example, 50% confluent 293 human kidney cells can be incubated with culture medium containing an RNAi compound and anti-angiogenic compound for 48 hours, followed by ELISA or mRNA quantification of the appropriate pro- and anti-angiogenic factor mRNA or protein. Cells incubated with dsRNA which is not homologous to the target sequence and a non-specific protein can be used as controls.

[0132] For example, cells which naturally express (or which are induced to express) a pro-angiogenic factor are grown to confluence in 96-well microtiter plates. An RNAi compound and an anti-angiogenic compound can be administered to one group of cells. An expression vector expressing a non-specific siRNA (or no siRNA) and a non-specific protein can be administered to a second group of cells as a control. The cells are washed and directly fixed to the microtiter plate wells with 1 to 2% paraformaldehyde. Nonspecific binding sites on the microtiter plate are blocked with 2% bovine serum albumin. The cells are then incubated with monoclonal antibodies specific for a given pro-angiogenic and anti-angiogenic factor, each of which can be labeled with a different detection agent.

[0133] For example, bound antibodies for pro-angiogenic factors can be derived from mice, and can be detected by incubation with a 1:1000 dilution of biotinylated goat anti-mouse IgG (Bethesda Research Laboratories, Gaithersberg, Md.) for 1 hour at 37° C. and with a 1:1000 dilution of streptavidin conjugated to beta-galactosidase (Bethesda Research Laboratories) for 1 hour at 37° C. The amount of beta-galactosidase bound to the monoclonal antibodies is determined, for example, by developing the microtiter plate in a solution of 3.3 mM chlorophenolred-beta-D-galactopyranoside, 50 mM sodium phosphate, 1.5 mM MgCl₂; pH 7.2 for 2 to 15 minutes at 37° C., and measuring the concentration of bound antibodies at 575 nm in an ELISA microtiter plate reader. Bound antibodies for anti-angiogenic factors can be derived from rabbits, and can be detected with fluorescein-labeled goat anti-rabbit IgG.

[0134] The ability of RNAi compounds and anti-angiogenic compounds to cause, respectively, a reduction in pro-angiogenic gene expression and an increase in the level of anti-angiogenic factors in target cells can also be evaluated in vitro by measuring tube formation by bovine retinal endothelial cells (BRECs), using techniques within the skill in the art. An inhibition of tube formation indicates a reduction of pro-angiogenic gene expression and an increase in the level of anti-angiogenic factor in target cells.

[0135] A suitable BREC tube formation assay comprises culturing BRECs on fibronectin-coated dishes containing Dulbecco's modified Eagle's medium (DMEM) with 5.5 mM glucose, 10% platelet-derived horse serum (PDHS; Wheaton, Pipersville, Pa.), 50 mg/mL heparin, and 50 U/mL endothelial cell growth factor (Roche Molecular Biochemicals). BRECs suitable for use in the tube-formation assay exhibit endothelial homogeneity by immunoreactivity for factor VIII antigen, and remain morphologically unchanged under these conditions as confirmed by light microscopy.

[0136] The tube formation assay can be performed as described in King G L et al., J. Clin. Invest. 75:1028-1036 (1985) and Otani A et al., Circ. Res. 82: 619-628 (1998), the entire disclosures of which are herein incorporated by reference. Briefly, an 8:1:1 (400 microliter) mixture of Vitrogen 100 (Celtrix, Palo Alto, Calif.), 0.2 N NaOH and 200 mM HEPES in 10× RPMI medium (Gibco BRL, Gaithersburg, Md.), containing 5 microgram/mL fibronectin and 5 microgram/mL laminin, is added to 24-well plates. After polymerization of the gels, 1.0×10⁵ of the cultured BRECs are seeded in the wells and incubated for 24 hours at 37° C. with DMEM containing 20% PDHS. The cell number is chosen to optimize the shape and tube length, as is known in the art (see King G L et al., 1985, supra and Otani A et al., 1998, supra). The medium is then removed, and additional collagen gel is introduced onto the cell layer. Before making the collagen gel, points can be randomly marked in the center area of the bottom of each well, in order to measure the density per surface area of any tubelike structures formed by the BRECs. Hypoxia-conditioned medium is then added to the wells to induce tube formation. An RNAi compound and an anti-angiogenic compound are then introduced into the BRECs of certain wells by any suitable procedure. Wells are treated with no RNAi compound and no anti-angiogenic compounds can be used as negative controls, and wells treated with non-specific dsRNA and non-specific protein can be used as positive controls. Inhibition of tube formation in the wells treated with RNAi compounds and anti-angiogenic compounds, as compared to control wells, indicates that expression of the pro-angiogenic gene has been has been inhibited and that the level of anti-angiogenic factor inside the cells has increased.

[0137] The effect of a treating a target cell with RNAi compounds and anti-angiogenic compounds can also be evaluated with animal models of neovascularization. Suitable animal models include mouse models of retinopathy of prematurity (“ROP”) or choroidal neovascularization (“CNV”) or primate models of CNV. For example, areas of neovascularization in an ROP or CNV mouse can be measured before and after treatment of target cells according to the present methods. A reduction in the areas of neovascularization in these models upon administration of the RNAi compounds and anti-angiogenic compounds indicates that expression of the pro-angiogenic gene has been reduced, and the level of anti-angiogenic factor inside the target cells has been increased.

[0138] Treatment of the target cells to reduce expression of at least one pro-angiogenic gene and to increase the level of at least one anti-angiogenic factor inhibits angiogenesis in a subject. Inhibition of angiogenesis in a subject can be evaluated by directly measuring the progress of pathogenic or nonpathogenic angiogenesis; for example, by observing the size of a neovascularized area before and after treatment of the target cells. An inhibition of angiogenesis is indicated if the size of the neovascularized area stays the same or is reduced. Techniques for observing and measuring the size of neovascularized areas in a subject are within the skill in the art; for example, areas of choroid neovascularization can be observed by ophthalmoscopy.

[0139] Inhibition of angiogenesis in a subject can also be inferred through observing a change or reversal in a pathogenic condition associated with the angiogenesis. For example, in AMD, a slowing, halting or reversal of vision loss indicates an inhibition of angiogenesis in the choroid. For tumors, a slowing, halting or reversal of tumor growth, or a slowing or halting of tumor metastasis, indicates an inhibition of angiogenesis at or near the tumor site. The size of a tumor can be ascertained by direct visual observation or by diagnostic imaging methods such as X-ray, magnetic resonance imaging, ultrasound, and scintigraphy. Diagnostic imaging methods used to ascertain size of a tumor can be employed with or without contrast agents, as is known in the art. The size of a tissue mass can also be ascertained by physical means, such as palpation of the tissue mass or measurement of the tissue mass with a measuring instrument such as a caliper. Inhibition of non-pathogenic angiogenesis in a subject can be inferred from, for example, fat loss or a reduction in cholesterol levels upon treatment of the target cells.

[0140] One skilled in the art can readily determine an effective amount of an RNAi compound or anti-angiogenic compound to be administered to a given subject, by taking into account factors such as the size and weight of the subject; the extent of the neovascularization or disease penetration; the age, health and sex of the subject; the route of administration; and whether the administration is regional or systemic.

[0141] Where the RNAi compound comprises an isolated dsRNA, an effective amount to be administered to a subject can comprise an amount which provides an intercellular concentration of the dsRNA at or near the neovascularization site of from about 1 nanomolar (mM) to about 100 nM, preferably from about 2 nM to about 50 nM, more preferably from about 2.5 nM to about 10 nM. Where the RNAi compound comprises an expression vector, an effective amount to be administered to a subject can comprise about 10 to about 1000 nanograms (ng), preferably about 20 to about 500 ng, particularly preferably about 50 to about 100 ng of the expression vector.

[0142] It is contemplated that greater or lesser amounts of RNAi compounds can be administered.

[0143] Where the anti-angiogenic compound comprises an isolated anti-angiogenic factor, an effective amount to be administered to a subject can comprise about 10 to about 3000 μg compound/kg of body weight. Preferably, the effective amount comprises about 50 to about 2000 μg compound/kg of body weight, more preferably about 100 to about 1000 μg compound/kg of body weight, particularly preferably about 150 to about 750 μg compound/kg of body weight, and is most preferably between about 200-500 μg compound/kg of body weight. Where the anti-angiogenic compound comprises an expression vector expressing the anti-angiogenic factor, an effective amount for administration to a subject can comprise about 10 to about 1000 nanograms (ng), preferably about 20 to about 500 ng, particularly preferably about 50 to about 100 ng.

[0144] It is contemplated that greater or lesser amounts of anti-angiogenic compounds can be administered.

[0145] The RNAi compounds and anti-angiogenic compounds can be administered in a single dose or in multiple doses. Where the administration is by infusion, the infusion can be a single sustained dose or can be delivered by multiple infusions. Injection directly into the tissue is at or near the site of neovascularization preferred. Multiple injections into the tissue at or near the site of neovascularization are particularly preferred.

[0146] One skilled in the art can also readily determine an appropriate dosage regimen for administering the RNAi compounds and anti-angiogenic compounds to a given subject. For example, the administration can be a single injection or deposition at or near the neovascularization site. Alternatively, the administration can be performed multiple times, for example daily or weekly. Preferably, the administration is once weekly for a period of from about three to about twenty-eight weeks, more preferably from about seven to about twenty weeks. In a particularly preferred dosage regimen, administration is by injection at or near the site of neovascularization (e.g., intravitreally) once every twelve weeks for an indefinite period of time. It is understood that periodic administrations for an indefinite length of time may be necessary for subjects suffering from a chronic neovascularization disease, such as wet AMD or diabetic retinopathy.

[0147] Where a dosage regimen comprises multiple administrations, it is understood that the effective amounts of RNAi compounds and anti-angiogenic compounds which are administered to the subject can comprise the total amount administered over the entire dosage regimen.

[0148] The present method can be used to inhibit angiogenesis which is non-pathogenic; i.e., angiogenesis which results from normal processes in the subject. Examples of non-pathogenic angiogenesis include endometrial neovascularization, and processes involved in the production of fatty tissues or cholesterol. Thus, the invention provides a method for inhibiting non-pathogenic angiogenesis; e.g., for controlling weight or promoting fat loss, for reducing cholesterol levels, or as an abortifacient.

[0149] The present methods can also inhibit angiogenesis which is associated with an angiogenic disease; i.e., a disease in which pathogenicity is associated with inappropriate or uncontrolled angiogenesis. For example, most cancerous solid tumors generate an adequate blood supply for themselves by inducing angiogenesis in and around the tumor site. This tumor-induced angiogenesis is often required for tumor growth, and also allows metastatic cells to enter the bloodstream. Other angiogenic diseases that can be treated with the present method include AMD, diabetic retinopathy, psoriasis, rheumatoid arthritis and other inflammatory diseases.

[0150] Preferably, the growth or metastasis of solid tumors associated with cancers is inhibited; for example breast cancer, lung cancer, head and neck cancer, brain cancer, abdominal cancer, colon cancer, colorectal cancer, esophagus cancer, gastrointestinal cancer, glioma, liver cancer, tongue cancer, neuroblastoma, osteosarcoma, ovarian cancer, pancreatic cancer, prostate cancer, retinoblastoma, Wilm's tumor, multiple myeloma; skin cancer (e.g., melanoma), lymphomas and blood cancer. More preferably, choroidal neovascularization in age-related macular degeneration or diabetic retinopathy is inhibited.

[0151] Another group of genes which cause a cell to exhibit a particular phenotype are the anti- and pro-apoptotic genes, examples of which are listed in Tables 10 and 11, respectively. The nucleic acid sequences encoding the corresponding anti- and pro-apoptotic factors and the amino acid sequences of these factors are provided in the sequence listing as indicated in Tables 10 and 11. Tables 10 and 11 and the sequences referred to therein are adapted from information provided on the website maintained by InvivoGen (San Diego, Calif. 92121).

TABLE 10
Anti-apoptotic Genes

| | | | SEQ ID NO: | |
|---|---|---|---|---|
| Reference⁴ | Anti-apoptotic Gene | Organism | nucleotide | protein |
| Chen M C et al. (2000), J Biol | Bcl-2 (B-cell | Homo sapiens | 1704 | 1705 |
| Chem 2000 Sep 18 | leukemia/lymphoma-2) | Mus musculus | 1706 | 1707 |
| Gauthier E R et al. (1996), Cancer Res | BclX_{L} (long isoform) | Homo sapiens | 1708 | 1709 |
| 56: 1451-1456 | | | | |

⁴All documents listed in Table 10 are herein incorporated by reference in their entirety.

[0152] TABLE 11
Pro-apoptotic Genes

| | | | SEQ ID NO: | |
|---|---|---|---|---|
| Reference³ | Pro-apoptotic Genes | Organism | nucleotide | protein |
| Jan M S et al. (1999) Biochem | Bad (Bcl2-antagonist of cell | Homo sapiens | 1710 | 1711 |
| Biophys Res Commun 264: | death) | | | |
| 724-9 | | Mus musculus | 1712 | 1713 |
| Pataer A et al. (2000) Cancer Res | Bak (a Bcl2 homolog) | Homo sapiens | 1714 | 1715 |
| 60: 788-92 | | | | |
| Kobayashi T et al. (1998) Oncogene | Bax | Homo sapiens | 1716 | 1717 |
| 16: 1587-1591 | | Mus musculus | 1718 | 1719 |
| Dole M G et al. (1996), Cancer Res | BclX_{S} (short isoform) | Homo sapiens | 1720 | 1721 |
| 56: 5734-5740 | | | | |
| Elangovan B et al. (1997), J Biol | Bik (Bcl2 interacting killer) | Homo sapiens | 1722 | 1723 |
| Chem 272: 24494-24498 | | | | |
| Yamabe K et al. (1999), Gene Ther | Casp-3 (Caspase-3) | Homo sapiens | 1724 | 1725 |
| 6: 1952-9 | | | | |

³All documents listed in Table 11 are herein incorporated by reference in their entirety.

[0153] Thus, in another embodiment, the invention provides a method of inducing apoptosis in a target cell, for example a cancer cell, by reducing expression of at least one anti-apoptotic gene and increasing the level of at least one pro-apoptotic factor in a target cell. Inducing apoptosis in cancer cells by the present method can inhibit tumor growth or metastasis in a subject. Thus, suitable target cells include tumor or cancer cells of the cancers listed above.

[0154] Reduction in expression of an anti-apoptotic gene in a target cell is achieved by treating the cell with one or more isolated dsRNA (e.g., one or more isolated siRNA) that induces RNAi of at least one anti-apoptotic gene. For example, the expression of Bcl-2 gene, or a Bcl-2 gene and a Bcl-_{XL} gene, can be reduced in a target cell by RNAi. A dsRNA which induces RNAi of an anti-apoptotic gene can also be expressed from an expression vector inside a target cell.

[0155] As above, compounds comprising isolated dsRNA or expression vectors expressing dsRNA are referred to as “RNAi compounds.” RNAi compounds which can induce RNAi of the anti-apoptotic genes can be produced by techniques within the skill in the art as described above, using the nucleic acid sequences from the figures referred to in Table 10. For example, target sequences for producing siRNA targeted to anti-apoptotic genes can be selected as outlined in Tuschl T et al., “The siRNA User Guide,” supra, and used to construct an siRNA.

[0156] Target cells are also treated to increase the level of at least one pro-apoptotic factor, for example by inducing the cell to up-regulate one or more pro-apoptotic genes, or by introducing one or more isolated pro-apoptotic factors or an expression vector which encodes one or more pro-apoptotic factor into the target cell. Expression vectors encoding pro-apoptotic factors can be constructed using the nucleic acid sequences from the figures referenced in Table 11, using techniques within the skill in the art as described above. Any compound which increases the level of a pro-apoptotic factor in a target cell is a “pro-apoptotic compound.”

[0157] As above, a target cell is “treated” a with an RNAi compound or pro-apoptotic compound by any technique suitable to introduce those compounds into a target cell, including direct administration to the cells, administration in conjunction with a nucleic acid delivery reagent, or transfection of the cell. Techniques for obtaining and introducing RNAi compounds or pro-apoptotic compounds into target cells are as described above for the RNAi compounds and anti-angiogenic compounds used to inhibit angiogenesis in a subject.

[0158] In a preferred embodiment, target cells in a subject are treated with a combination expression vector, which is a single expression vector comprising nucleic acid sequences encoding at least one siRNA targeted to one or more anti-apoptotic genes, and nucleic acid sequences that encode at least one pro-apoptotic gene. It is understood that the combination expression vector is both an RNAi compound and a pro-apoptotic compound.

[0159] The effective amount of an RNAi compound or pro-apoptotic compound for administration to a subject is determined by the particular circumstances of the individual subject, including the subject's size, weight, age and sex, the nature and stage of the disease being treated, the aggressiveness of the disease, the route of administration, and whether the administration is regional or systemic. One of ordinary skill in the art is capable of evaluating these factors and choosing an appropriate amount of the present compounds. Effective amounts of the RNAi compound for inducing RNAi of anti-apoptotic genes, and effective amounts of pro-apoptotic compounds, are as described above for the RNAi compounds and anti-angiogenic compounds used to inhibit angiogenesis in a subject.

[0160] The ability of RNAi compounds and pro-apoptotic compounds to cause, respectively, a reduction in anti-apoptotic gene expression and an increase in the level of pro-apoptotic factors in target cells can be evaluated in cell culture systems. For example, cultured cells can be analyzed daily for survival and induction of the apoptotic response over a period of 10 days. Cell number and viability is determined by trypan blue exclusion, and cell cycle distribution and the presence of sub-diploid cells in the treatment groups is determined by flow cytometry analysis. For the flow cytometric analysis, cells are washed twice in 1% phosphate-buffered saline (PBS) containing 1% FBS, and the washed cells are fixed in 80% cold ethanol for 60 minutes, pelleted and resuspended in PBS/1% FBS containing 50 μg/ml of propidium iodide and 1 mg/ml of RNAse. After a 30 minute incubation at 37° C., the cells are analyzed with a Coulter Epic Elite flow cytometer. DNA can be isolated from the cells and electrophoresed on 1.8% agarose gels to demonstrate the appearance of “ladders,” which result from the endonucleolytic cleavage of DNA characteristic of apoptosing cells.

[0161] Treatment of the target cells in a subject to reduce expression of at least one anti-apoptotic gene and to increase the level of at least one pro-apoptotic factor inhibits tumor growth in a subject. Inhibition of tumor growth can be inferred if the size of a tumor remains constant or decreases over time. The size of a tumor can be ascertained by direct visual observation or by diagnostic imaging methods such as X-ray, magnetic resonance imaging, ultrasound, and scintigraphy. Diagnostic imaging methods used to ascertain size of a tumor can be employed with or without contrast agents, as is known in the art. The size of a tumor can also be ascertained by physical means, such as palpation of the tumor or measurement of the tumor with a measuring instrument such as a caliper.

[0162] The RNAi compounds and anti-angiogenic or pro-apoptotic compounds are preferably formulated as pharmaceutical compositions prior to administering to a subject, according to techniques known in the art. Pharmaceutical compositions of the present invention are characterized as being at least sterile and pyrogen-free. As used herein, “pharmaceutical formulations” include formulations for human and veterinary use. Methods for preparing pharmaceutical compositions of the invention are within the skill in the art, for example as described in Remington's Pharmaceutical Science, 17th ed., Mack Publishing Company, Easton, Pa. (1985), the entire disclosure of which is herein incorporated by reference.

[0163] The present pharmaceutical formulations comprise, for example, RNAi compounds and anti-angiogenic or pro-apoptotic compounds (e.g., 0.1 to 90% by weight), or a physiologically acceptable salt thereof, mixed with a physiologically acceptable carrier medium. Preferred physiologically acceptable carrier media are water, buffered water, saline solutions (e.g., normal saline or balanced saline solutions such as Hank's or Earle's balanced salt solutions), 0.4% saline, 0.3% glycine, hyaluronic acid and the like.

[0164] Pharmaceutical compositions of the invention can also comprise conventional pharmaceutical excipients and/or additives. Suitable pharmaceutical excipients include stabilizers, antioxidants, osmolality adjusting agents, buffers, and pH adjusting agents. Suitable additives include physiologically biocompatible buffers (e.g., tromethamine hydrochloride), additions of chelants (such as, for example, DTPA or DTPA-bisamide) or calcium chelate complexes (as for example calcium DTPA, CaNaDTPA-bisamide), or, optionally, additions of calcium or sodium salts (for example, calcium chloride, calcium ascorbate, calcium gluconate or calcium lactate). Pharmaceutical compositions of the invention can be packaged for use in liquid form, or can be lyophilized.

[0165] For topical administration to the eye, conventional intraocular delivery reagents can be used. For example, pharmaceutical compositions of the invention for topical intraocular delivery can comprise saline solutions as described above, corneal penetration enhancers, insoluble particles, petrolatum or other gel-based ointments, polymers which undergo a viscosity increase upon instillation in the eye, or mucoadhesive polymers. Preferably, the intraocular delivery reagent increases corneal penetration, or prolongs preocular retention of the RNAi compounds, anti-angiogenic or pro-apoptotic compounds through viscosity effects or by establishing physicochemical interactions with the mucin layer covering the corneal epithelium.

[0166] Suitable insoluble particles for topical intraocular delivery include the calcium phosphate particles described in U.S. Pat. No. 6,355,271 of Bell et al., the entire disclosure of which is herein incorporated by reference. Suitable polymers which undergo a viscosity increase upon instillation in the eye include polyethylenepolyoxypropylene block copolymers such as poloxamer 407 (e.g., at a concentration of 25%), cellulose acetophthalate (e.g., at a concentration of 30%), or a low-acetyl gellan gum such as Gelrite® (available from CP Kelco, Wilmington, Del.). Suitable mucoadhesive polymers include hydrocolloids with multiple hydrophilic functional groups such as carboxyl, hydroxyl, amide and/or sulfate groups; for example, hydroxypropylcellulose, polyacrylic acid, high-molecular weight polyethylene glycols (e.g., >200,000 number average molecular weight), dextrans, hyaluronic acid, polygalacturonic acid, and xylocan. Suitable corneal penetration enhancers include cyclodextrins, benzalkonium chloride, polyoxyethylene glycol lauryl ether (e.g., Brij® 35), polyoxyethylene glycol stearyl ether (e.g., Brij® 78), polyoxyethylene glycol oleyl ether (e.g., Brij® 98), ethylene diamine tetraacetic acid (EDTA), digitonin, sodium taurocholate, saponins and polyoxyethylated castor oil such as Cremaphor EL.

[0167] For solid compositions, conventional nontoxic solid carriers can be used; for example, pharmaceutical grades of mannitol, lactose, starch, magnesium stearate, sodium saccharin, talcum, cellulose, glucose, sucrose, magnesium carbonate, and the like.

[0168] For example, a solid pharmaceutical composition for oral administration can comprise any of the carriers and excipients listed above and 10-95%, preferably 25%-75%, of one or more RNAi compounds, anti-angiogenic or pro-apoptotic compounds. A pharmaceutical composition for aerosol (inhalational) administration can comprise 0.01-20% by weight, preferably 1%-10% by weight, of one or more siRNA of the invention encapsulated in a liposome as described above, and propellant. A carrier can also be included as desired; e.g., lecithin for intranasal delivery.

[0169] The invention will now be illustrated by the following non-limiting examples.

### EXAMPLE 1

### Expression of PEDF and siRNA Targeted to VEGF in Human Cells

[0170] Plasmids expressing human PEDF and either hVEGF#5 or hVEGF#2 siRNA (which target human VEGF mRNA) or negative control siRNA were constructed as follows. Complementary oligonucleotides for expressing hVEGF#5 or hVEGF#2 siRNA were synthesized, annealed, and ligated into pSilencer 2.0-U6 siRNA Expression Vector (Ambion #7209). An oligonucleotide sequence for expressing a negative control hairpin siRNA was also synthesized, annealed and ligated into the pSilencer vector. The negative control siRNA consisted of a random target sequence. These oligonucleotides formed a hairpin structure when expressed. (See FIG. 3 for a schematic of the hVEGF#5 target sequence, the annealed DNA insert encoding hVEGF#5 hairpin siRNA, and the hVEGF#5 hairpin siRNA.).

[0171] The complementary oligonucleotides used to form the double-stranded insert encoding the hVEGF#5 siRNA hairpin were:

hVEGF#5-a

(SEQ ID NO.1728)

GATCCACCTCACCAAGGCCAGCACTTCAAGAGAGTGCTGGCCTTGGTGAG
GTTTTTTTGGAAA
hVEGF#5-b

(SEQ ID NO.1729)

AGCTTTTCCAAAAAAACCTCACCAAGGCCAGCACTCTCTTGAAGTGCTGG
CCTTGGTGAGGTG
The complementary oligonucleotides used to form
the double-stranded insert encoding the hVEGF#2
siRNA hairpin were:
hVEGF#2-a

(SEQ ID NO.1730)

GATCCGTTCATGGATGTCTATCAGTTCAAGAGACTGATAGACATCCATGA
ACTTTTTTGGAAA
hVEGF#2-b

(SEQ ID NO.1731)

AGCTTTTCCAAAAAAGTTCATGGATGTCTATCAGTCTCTTGAACTGATAG
ACATCCATGAACG

[0172] The DNA fragments from the plasmids which produce the siRNA hairpin structures and the pU6 promoter were removed from the pSilencer vector by digestion with restriction enzyme PvuII. The PvuII fragments were inserted separately into the pCMS-EGFP vector (BD #6101-1), in place of the EGFP/PvuII fragment in that vector. The resulting plasmids were named pCMS-pU6-(siRNA)

[0173] A human PEDF cDNA fragment (SEQ ID NO. 1727) was then inserted into the MluI and SalI sites in the multiple cloning site on each plasmid pCMS-pU6-(siRNA), under the control of the pCMV promoter. The resulting plasmids were called pCMS-PEDF-pU6-(siRNA), and contained a human PEDF cDNA open reading frame under a pCMV promoter, and a nucleotide sequence encoding an siRNA hairpin targeting human VEGF under a pU6 promoter. In all, three plasmids were made: pCMS-PEDF-pU6-HVEGF#5; pCMS-PEDF-pU6-hVEGF#2; and pCMS-PEDF-pU6-NC (expressing a negative control siRNA targeted to enhanced green fluorescent protein or “EGFP”).

[0174] Human embryonic kidney (HEK) 293 cells were cultured overnight in 24 well plates at 37° C. with 5% CO₂. The next day, transfections with the pCMS-PEDF-pU6-(siRNA) plasmids in calcium phosphate (“CaPi”) reagent were performed when cells were 70% confluent. The amount of plasmid used to transfect the cells was 0.5 μg, 1 μg, and 2 μg for each of pCMS-PEDF-pU6-HVEGF#5, pCMS-PEDF-pU6-hVEGF#2, and pCMS-PEDF-pU6-NC. Other controls included mock transfection of cells with CaPi transfection reagent lacking plasmid, 25 nM hVEGF#2 siRNA and plasmid pCMS-pU6-hVEGF#2 (which lacks the PEDF sequence).

[0175] Hypoxia was induced in the HEK 293 cells with desferrioxamine at a final concentration of 130 μM four hours after transfection. Twenty four and 48 hours post transfection, the supernatant was removed from all culture dish wells, and a human VEGF ELISA (R & D systems, Minneapolis, Minn.) and a human PEDF ELISA (Chemicon, Temecula, Calif.) were performed according to the manufacturer's instructions. ELISA results were read on an AD340 plate reader (Beckman Coulter), and are reported in FIG. 4.

[0176] As shown in FIG. 4, human VEGF was upregulated by the desferrioxamine-mediated induction of hypoxia. The hypoxia-induced increase of hVEGF protein level reduced significantly from cells transfected with plasmids pCMS-PEDF-pU6-hVEGF#2 in a dose-dependent manner. The positive controls hVEGF#2 siRNAs and plasmid pCMS-pU6-hVEGF#2 showed suppression of hVEGF expression in the HEK 293 cells, while transfections with negative control plasmid pCMS-PEDF-pU6-NC or mock transfection without plasmid had no effect on hVEGF levels. Plasmid pCMS-PEDF-pU6-HVEGF#5 showed moderate suppression of human VEGF expression in this experiment.

[0177] Plasmids pCMS-PEDF-pU6-siRNAs (HVEGF#5 and hVEGF#2 siRNAs) expressed human PEDF protein in HEK 293 cells in a dose and time dependent manner (see FIG. 5). No human PEDF was detected in supernatants from cells which were mock transfected or transfected with control plasmids.

[0178] After the supernatants were removed from cells after transfection as described above, a cytotoxicity assay was performed as follows: Complete growth medium containing 10% AlamarBlue (Biosource, Camarillo, Calif.) was added to each well, and cells were incubated at 37° C. with 5% CO₂ for 3 hours. Cell proliferation was measured by detecting the color change of medium containing AlamarBlue which resulted from cell metabolic activity. Cytotoxicity assay results were read on an AD340 plate reader (Beckman Coulter), and are reported in FIG. 6. As shown in FIG. 6, desferrioxamine-mediated hypoxia caused slight cytotoxicity to HEK 293 cells. The transfection with functional plasmids showed no apparent cytotoxicity as compared with transfection of HEK cells with negative control plasmids or mock transfections.

[0179] After cytotoxicity assay, the growth medium in each well was completely removed. RNA extractions from the HEK 293 cells were performed by using the RNAqueous RNA isolation kit (Ambion, Austin, Tex.) according to the manufacturer's instructions. Human VEGF and PEDF mRNA levels of in HEK 293 cells were measured by reverse transcription-polymerase chain reaction (RT-PCR). Expression of human glyceraldehyde-3-phosphate dehydrogenase (GAPDH) mRNA was used as a control.

[0180] Hypoxia-induced upregulation of human VEGF in HEK 293 cells was suppressed significantly by plasmid pCMS-PEDF-pU6-hVEGF#2 in a dose-dependent manner at the transcriptional level, as measured by RT-PCR (see FIG. 7). The VEGF mRNA levels in HEK 293 cells transfected with the negative control siRNA or cells which were mock transfected were not affected. The cells transfected with the negative control plasmids showed very weak PEDF mRNA signals, which may have come from the endogenous PEDF gene. These results indicate that the expression of hVEGF#2 siRNA in HEK 293 cells suppressed VEGF mRNA expression, and that this suppression was correlated with VEGF suppression at the protein level.

### EXAMPLE 2

### Expression of Angiostatin and siRNA Targeted to HIF-1 Alpha in Human Cells

[0181] Two complementary oligonucleotides were synthesized, annealed, and ligated into pSilencer 2.0-U6 siRNA Expression Vector (Ambion #7209) as in Example 1 above, to express either a hairpin siRNA hHIF1α#11 or a negative control siRNA targeted to EGFP. The complementary oligonucleotides used to form the double-stranded DNA insert encoding the HIF1-alpha siRNA hairpin were:

hHIF1-alpha#11-a

(SEQ ID NO.1732)

GATCCAGTCGGACAGCCTCACCAATTCAAGAGATTGGTGAGGCTGTCCGA
CTTTTTTTGGAAA
hHIF1-alpha#11-b

(SEQ ID NO.1733)

AGCTTTTCCAAAAAAAGTCGGACAGCCTCACCAATCTCTTGAATTGGTGA
GGCTGTCCGACTG

[0182] The DNA fragments encoding the siRNA hairpin structures were excised from the pSilencer vector along with the pU6 promoter using PvuII, and inserted into the pCMS-EGFP vector (BD #6101-1) in place of the EGFP/PvuII fragment. The resulting plasmids were named pCMS-pU6-(siRNA). A human angiostatin cDNA fragment (the N-terminal fragment of human plasminogen up to residue 384; SEQ ID NO: 1726) was then inserted into the MluI and SalI sites in the multi-cloning site (MCS) of the pCMS-pU6-(siRNA) plasmids, under control of the pCMV promoter. The resulting plasmids were called pCMS-Angst-pU6-(siRNA), and contained an human angiostatin open reading frame under a pCMV promoter and an siRNA hairpin targeting human HIF1α or EGFP under a pU6 promoter. In all, two plasmids were made: pCMS-Angst-pU6-hHIF1-alpha#11 and pCMS-Angst-pU6-NC (expressing a negative control siRNA targeted to enhanced EGFP).

[0183] HEK 293 cells were grown and transfected with 0.5 μg, 1 μg, and 2 μg pCMS-Angio-pU6-hHIF1-alpha#11 as described in Example 1. The transfection controls used were plasmid pCMS-PEDF-pU6-NC from Example 1, plasmid pCMS-pU6-hHIF1-alpha#11 (which does not express angiostatin), hHIF1-alpha#11 siRNA, and mock transfection with CaPi transfection reagent but no plasmid. Measurement of HiF-1 alpha protein and mRNA levels and cytotoxicity assays were performed as in Example 1.

[0184] As shown in FIG. 8, human VEGF was upregulated by the desferrioxamine-mediated induction of hypoxia. The hypoxia-induced increase of hVEGF protein level reduced significantly from cells transfected with plasmids pCMS-Angst-pU6-hHIF1α#11 in a dose-dependent manner. The positive controls hHIF1α·11 siRNAs and plasmid pCMS-pU6-hHIF1α#11 showed significant suppression of hVEGF expression while transfections with negative control plasmid pCMS-Angst-pU6-NC or mock transfection without plasmid had no effect on hVEGF levels.

[0185] Plasmids pCMS-Angst-pU6-hHIF1-alpha#11 and pCMS-Angst-pU6-NC expressed human angiostatin protein in a dose and time dependent manner (FIG. 9). No human angiostatin protein signals were detected supernatants from cells transfected with negative control plasmids without angiostatin (intermediate plasmids pCMS-pU6-hHIF1-alpha# 1 or pCMS-pU6-NC.

[0186] Human angiostatin mRNA levels in HEK 293 cells transfected with plasmids pCMS-Angst-pU6-hHIF1-alpha#11 and pCMS-Angst-pU6-NC varied in response to the amount of plasmid (FIG. 10). No human angiostatin mRNA was detected in HEK 293 cells transfected with negative control plasmids without angiostatin pCMS-pU6-hHIF1-alpha#11 or pCMS-pU6-NC.

[0187] Desferrioxamine-mediated hypoxia caused slight cytotoxicity to HEK 293 cells (FIG. 11). Transfection of HEK 293 cells with plasmids pCMS-Angst-pU6-hHIF1-alpha#11 and pCMS-Angst-pU6-NC showed no apparent cytotoxicity, as compared with transfection of these cells with negative control plasmids or mock transfection.

### EXAMPLE 3

### Construction of Adeno-Associated Viral Vector Expressing RNAi Compounds

[0188] The nucleotide sequences encoding the anti-angiogenic compound (PEDF or angiostatin) and the siRNA will be excised from plasmids pCMS-PEDF-pU6-HVEGF#5; pCMS-PEDF-pU6-hVEGF#2 and pCMS-Angst-pU6-hHIF1-alpha#11, and inserted in between the inverted terminal repeats of a commercially available adeno-associated viral (AAV) plasmid. Recombinant AAV vector will be prepared by using the three-plasmid cotransfection system as described, for example, in Matsushita, T., 1998, Gene Ther. 5, 938-945, the entire disclosure of which is herein incorporated by reference. Briefly, the AAV vector will be cotransfected with two helper plasmids (Avigen, Alameda, Calif.) into HEK 293 cells by the CaPi precipitate method. One helper plasmid, pLadeno5, will contain the adenoviral VA, E2A, and E4 regions that mediate AAV vector replication. The other helper plasmid, pHLP19, will have the AAV rep and cap genes. Cell lysates will be produced by using three freeze-and-thaw cycles 3 days after the transfection. Recombinant AAV vector will be purified by CsCl₂ centrifugation, and viral titers will be determined by dot blot analysis of the DNA content. It is expected that the recombinant AAV vectors will infect target cells and express the PEDF or angiostatin and the appropriate siRNA. The protein and mRNA levels of the pro- or anti-angiogenic genes in the target cells are expected to be increased or decreased as reported above for the HEK 293 cells in Examples 1 and 2.

We claim:

1. A method of inducing a desired physiological state in a subject, comprising:
(1) treating target cells of the subject with an effective amount of at least one RNAi compound to reduce expression of the at least one first gene by RNAi; and
(2) treating the target cells with an effective amount of at least one compound that increases the expression of at least one second gene,
wherein the reduced expression of the at least one first gene and the increased expression from the at least one second gene in the target cells induces the desired physiological state in the subject.

2. The method of claim 1, wherein the desired physiological state is inhibition of angiogenesis in the subject.

3. The method of claim 1, wherein the at least one first gene is a pro-angiogenic gene.

4. The method of claim 1, wherein the at least one second gene is an anti-angiogenic gene.

5. The method of claim 3, wherein the pro-angiogenic gene is selected from the group consisting of VEGF, Flt-1, Flk-1/KDR, HIF-1 alpha, ICAM-1, Ang1, Ang2 and Tie-2 genes.

6. The method of claim 1 wherein the at least one first gene is VEGF and HIF-1 alpha; VEGF and Ang2; VEGF and ICAM-1; or VEGF, HIF-1 alpha and Ang2.

7. The method of claim 4, wherein the anti-angiogenic gene is selected from the group consisting of Ang2, angiostatin, antiThrombin-3, ATF, calreticulin, endostatin, IP-10, K1-5, kringle-5 domain, maspin, Mig/CXCL9, PEDF, PEX, CXCL4, PRP, TIMP-1, TIMP-2, TIMP-3, TIMP-4, troponin 1-2, T2-TrpR5, TSP-1 and tumstatin genes.

8. The method of claim 1, wherein the at least one first gene is VEGF, and the at least one second gene is PEDF, endostatin or angiostatin.

9. The method of claim 1, wherein the at least one first gene is HIF-1 alpha, and the at least one second gene is PEDF, endostatin or angiostatin.

10. The method of claim 1, wherein the target cells are retinal pigment epithelial cells.

11. The method of claim 1, wherein the desired physiological effect is induction of apoptosis in the target cells.

12. The method of claim 1, wherein the at least one first gene is an anti-apoptotic gene.

13. The method of claim 1, wherein the at least one second gene is a pro-apoptotic gene.

14. The method of claim 12, wherein the anti-apoptotic gene is selected from the group consisting of Bcl-2 and BCl-x_{L} genes.

15. The method of claim 13, wherein the pro-apoptotic gene is selected from the group consisting of Bad, Bak, Bax, BclXₛ, Bik and Casp-3 genes.

16. The method of claim 1, wherein the target cells are cancer cells.

17. The method of claim 1, wherein the at least one RNAi compound comprises an isolated siRNA.

18. The method of claim 1, wherein the at least one RNAi compound comprises an expression vector encoding at least one siRNA.

19. The method of claim 1, wherein the at least one compound of step (2) comprises an isolated protein produced from the at least one second gene.

20. The method of claim 1, wherein the at least one compound of step (2) comprises an expression vector encoding the at least one second gene.

21. The method of claim 1, wherein the at least one RNAi compound and the at least one compound of step (2) together comprise a single expression vector comprising:
(1) nucleic acid sequences for expressing an siRNA targeted to the at least one first gene; and
(2) nucleic acid sequences for expressing the at least one second gene.

22. A method of inhibiting angiogenesis in a subject, comprising:
(1) treating target cells of the subject with an effective amount of at least one RNAi compound to reduce expression of at least one pro-angiogenic gene by inducing RNAi of the pro-angiogenic gene; and
(2) treating the target cells with an effective amount of at least one anti-angiogenic compound to increase the level of anti-angiogenic factor from at least one anti-angiogenic gene,
wherein the reduced expression of the at least one pro-angiogenic gene and the increased level of anti-angiogenic factor from the at least one anti-angiogenic gene in the target cells inhibits angiogenesis in the subject.

23. The method of claim 22, wherein the pro-angiogenic gene is selected from the group consisting of VEGF, Flt-1, Flk-1/KDR, HIF-1 alpha, ICAM-1, Ang1, Ang2 and Tie-2 genes.

24. The method of claim 22, wherein the at least one pro-angiogenic gene is VEGF and HIF-1 alpha; VEGF and Ang2; VEGF and ICAM-1; or VEGF, HIF-1 alpha and Ang2.

25. The method of claim 22, wherein the anti-angiogenic gene is selected from the group consisting of Ang2, angiostatin, antiThrombin-3, ATF, calreticulin, endostatin, IP-10, K1-5, kringle-5 domain, maspin, Mig/CXCL9, PEDF, PEX, CXCL4, PRP, TIMP-1, TIMP-2, TIMP-3, TIMP-4, troponin 1-2, T2-TrpR5, TSP-1 and tumstatin genes.

26. The method of claim 22, wherein the at least one pro-angiogenic gene is VEGF, and the at least one anti-angiogenic gene is PEDF, endostatin or angiostatin.

27. The method of claim 22, wherein the at least one pro-angiogenic gene is HIF-1 alpha, and the at least one anti-angiogenic gene is PEDF, endostatin or angiostatin.

28. The method of claim 22, wherein the target cells are retinal pigment epithelial cells.

29. The method of claim 22, wherein the angiogenesis is pathogenic.

30. The method of claim 22, wherein the angiogenesis is non-pathogenic.

31. The method of claim 22, wherein the at least one RNAi compound comprises at least one isolated siRNA.

32. The method of claim 22, wherein the at least one RNAi compound comprises an expression vector encoding at least one siRNA.

33. The method of claim 22, wherein the at least one anti-angiogenic compound comprises an anti-angiogenic factor produced from the at least one anti-angiogenic gene.

34. The method of claim 22, wherein the at least one anti-angiogenic compound comprises an expression vector encoding the at least one anti-angiogenic gene.

35. The method of claim 22, wherein the at least one RNAi compound and the at least one anti-angiogenic compound together comprise a single expression vector comprising:
(1) nucleic acid sequences for expressing an siRNA targeted to the at least one pro-angiogenic gene; and
(2) nucleic acid sequences for expressing the at least one anti-angiogenic gene.

36. A method of treating an angiogenic disease in a subject, comprising:
(1) treating target cells of the subject with an effective amount of at least one RNAi compound to reduce expression of at least one pro-angiogenic gene by RNAi; and
(2) treating the target cells with an effective amount of at least one anti-angiogenic compound to increase the level of anti-angiogenic factor from at least one anti-angiogenic gene,
wherein the reduced expression of the at least one pro-angiogenic gene and the increased level of anti-angiogenic factor from the at least one anti-angiogenic gene in the target cells inhibits angiogenesis in the subject.

37. The method of claim 36, wherein the at least one RNAi compound comprises at least one isolated siRNA.

38. The method of claim 36, wherein the at least one RNAi compound and the at least one anti-angiogenic compound together comprise a single expression vector comprising:
(1) nucleic acid sequences for expressing an siRNA targeted to the at least one pro-angiogenic gene; and
(2) nucleic acid sequences for expressing the at least one anti-angiogenic gene.

39. The method of claim 36, wherein the angiogenic disease is selected from the group consisting of cancer, AMD, diabetic retinopathy, psoriasis, rheumatoid arthritis and inflammatory diseases.

40. A method of inducing apoptosis in target cells of a subject, comprising:
(1) treating the target cells with an effective amount of at least one RNAi compound to reduce expression of at least one anti-apoptotic gene by RNAi; and
(2) treating the target cells with an effective amount of at least one pro-apoptotic compound to increase the level of pro-apoptotic factor from at least one pro-apoptotic gene,
wherein the reduced expression of the at least one anti-apoptotic gene and the increased level of pro-apoptotic factor from the at least one pro-apoptotic gene in the target cells induces apoptosis in target cells of the subject.

41. The method of claim 40, wherein the anti-apoptotic gene is selected from the group consisting of Bcl-2 and BCl-x_{L} genes.

42. The method of claim 40, wherein the pro-apoptotic gene is selected from the group consisting of Bad, Bak, Bax, BclX_{S}, Bik and Casp-3 genes.

43. The method of claim 40, wherein the target cells are cancer cells.

44. The method of claim 40, wherein the at least one RNAi compound comprises at least one isolated siRNA.

45. The method of claim 40, wherein the at least one RNAi compound comprises an expression vector encoding at least one siRNA.

46. The method of claim 40, wherein the at least one pro-apoptotic compound comprises an isolated pro-apoptotic factor produced from the at least one pro-apoptotic gene.

47. The method of claim 40, wherein the at least one pro-apoptotic compound comprises an expression vector encoding the at least one pro-apoptotic gene.

48. The method of claim 40, wherein the at least one RNAi compound and the at least one pro-apoptotic compound together comprise a single expression vector comprising:
(1) nucleic acid sequences for expressing an siRNA targeted to the at least one anti-apoptotic gene; and
(2) nucleic acid sequences for expressing the at least one pro-apoptotic gene.

49. A method of treating cancer in a subject, comprising:
(1) treating cancer cells of the subject with an effective amount of at least one RNAi compound to reduce expression of at least one anti-apoptotic gene by RNAi; and
(2) treating the cancer cells with an effective amount of at least one pro-apoptotic compound to increase the level of pro-apoptotic factor from at least one pro-apoptotic gene,
wherein the reduced expression of the at least one anti-apoptotic gene and the increased level of pro-apoptotic factor from the at least one pro-apoptotic gene in the cancer cells inhibits tumor growth the subject.

50. The method of claim 49, wherein the cancer to be treated is selected from the group consisting of breast cancer, lung cancer, head and neck cancer, brain cancer, abdominal cancer, colon cancer, colorectal cancer, esophagus cancer, gastrointestinal cancer, glioma, liver cancer, tongue cancer, neuroblastoma, osteosarcoma, ovarian cancer, pancreatic cancer, prostate cancer, retinoblastoma, Wilm's tumor, multiple myeloma; skin cancer, lymphomas and blood cancer.

51. The method of claim 49, wherein the anti-apoptotic gene is selected from the group consisting of Bcl-2 and Bcl-x_{L} genes.

52. The method of claim 49, wherein the pro-apoptotic gene is selected from the group consisting of Bad, Bak, Bax, BclX_{S}, Bik and Casp-3 genes.

53. The method of claim 49, wherein the at least one RNAi compound comprises at least one isolated siRNA.

54. The method of claim 49, wherein the at least one RNAi compound comprises an expression vector encoding at least one siRNA.

55. The method of claim 49, wherein the at least one RNAi compound and the at least one pro-apoptotic compound together comprise a single expression vector comprising:
(1) nucleic acid sequences for expressing an siRNA targeted to the at least one anti-apoptotic gene; and
(2) nucleic acid sequences for expressing the at least one pro-apoptotic gene.

56. A pharmaceutical composition comprising a single expression vector comprising:
(1) nucleic acid sequences for expressing an siRNA targeted to at least one first gene; and
(2) nucleic acid sequences for expressing at least one second gene.

57. A pharmaceutical composition comprising a single expression vector comprising:
(1) nucleic acid sequences for expressing an siRNA targeted to at least one pro-angiogenic gene; and
(2) nucleic acid sequences for expressing at least one anti-angiogenic gene.

58. A pharmaceutical composition comprising a single expression vector comprising:
(1) nucleic acid sequences for expressing an siRNA targeted to at least one anti-apoptotic gene; and
(2) nucleic acid sequences for expressing at least one pro-apoptotic gene.

59. An expression vector comprising:
(1) nucleic acid sequences for expressing an siRNA targeted to at least one pro-angiogenic gene; and
(2) nucleic acid sequences for expressing at least one anti-angiogenic gene.

60. The expression vector of claim 59, wherein the at least one pro-angiogenic gene is VEGF or HIF-1 alpha.

61. The expression vector of claim 59, wherein the at least one anti-angiogenic gene is PEDF or angiostatin.

62. An expression vector comprising:
(1) nucleic acid sequences for expressing an siRNA targeted to at least one anti-apoptotic gene; and
(2) nucleic acid sequences for expressing at least one pro-apoptotic gene.

The application's sequence listing, which the Patent Office published only in electronic form, follows.

SEQUENCE LISTING (1733 sequences)

SEQ ID NO: 1 - DNA, 444 bp, Homo sapiens
atgaactttctgctgtcttgggtgcattggagccttgccttgctgctctacctccaccatgccaagtggtcccaggctgcacccatggcagaaggaggagggcagaatcatcacgaagtggtgaagttcatggatgtctatcagcgcagctactgccatccaatcgagaccctggtggacatcttccaggagtaccctgatgagatcgagtacatcttcaagccatcctgtgtgcccctgatgcgatgcgggggctgctgcaatgacgagggcctggagtgtgtgcccactgaggagtccaacatcaccatgcagattatgcggatcaaacctcaccaaggccagcacataggagagatgagcttcctacagcacaacaaatgtgaatgcagaccaaagaaagatagagcaagacaagaaaaatgtgacaagccgaggcggtga

SEQ ID NO: 2 - DNA, 576 bp, Homo sapiens
atgaactttctgctgtcttgggtgcattggagccttgccttgctgctctacctccaccatgccaagtggtcccaggctgcacccatggcagaaggaggagggcagaatcatcacgaagtggtgaagttcatggatgtctatcagcgcagctactgccatccaatcgagaccctggtggacatcttccaggagtaccctgatgagatcgagtacatcttcaagccatcctgtgtgcccctgatgcgatgcgggggctgctgcaatgacgagggcctggagtgtgtgcccactgaggagtccaacatcaccatgcagattatgcggatcaaacctcaccaaggccagcacataggagagatgagcttcctacagcacaacaaatgtgaatgcagaccaaagaaagatagagcaagacaagaaaatccctgtgggccttgctcagagcggagaaagcatttgtttgtacaagatccgcagacgtgtaaatgttcctgcaaaaacacagactcgcgttgcaaggcgaggcagcttgagttaaacgaacgtacttgcagatgtgacaagccgaggcggtga

SEQ ID NO: 3 - DNA, 648 bp, Homo sapiens
atgaactttctgctgtcttgggtgcattggagccttgccttgctgctctacctccaccatgccaagtggtcccaggctgcacccatggcagaaggaggagggcagaatcatcacgaagtggtgaagttcatggatgtctatcagcgcagctactgccatccaatcgagaccctggtggacatcttccaggagtaccctgatgagatcgagtacatcttcaagccatcctgtgtgcccctgatgcgatgcgggggctgctgcaatgacgagggcctggagtgtgtgcccactgaggagtccaacatcaccatgcagattatgcggatcaaacctcaccaaggccagcacataggagagatgagcttcctacagcacaacaaatgtgaatgcagaccaaagaaagatagagcaagacaagaaaaaaaatcagttcgaggaaagggaaaggggcaaaaacgaaagcgcaagaaatcccggtataagtcctggagcgttccctgtgggccttgctcagagcggagaaagcatttgtttgtacaagatccgcagacgtgtaaatgttcctgcaaaaacacagactcgcgttgcaaggcgaggcagcttgagttaaacgaacgtacttgcagatgtgacaagccgaggcggtga

SEQ ID NO: 4 - DNA, 670 bp, Homo sapiens
gccttgctgctctacctccaccatgccaagtggtcccaggctgcacccatggcagaaggaggagggcagaatcatcacgaagtggtgaagttcatggatgtctatcagcgcagctactgccatccaatcgagaccctggtggacatcttccaggagtaccctgatgagatcgagtacatcttcaagccatcctgtgtgcccctgatgcgatgcgggggctgctgcaatgacgagggcctggagtgtgtgcccactgaggagtccaacatcaccatgcagattatgcggatcaaacctcaccaaggccagcacataggagagatgagcttcctacagcacaacaaatgtgaatgcagaccaaagaaggatagagcaagacaagaaaaaaaatcagttcgaggaaagggaaaggggcaaaaacgaaagcgcaagaaatcccggtataagtcctggagcgtttacgttggtgcccgctgctgtctaatgccctggagcctccctggcccccatccctgtgggccttgctcagagcggagaaagcatttgtttgtacaagatccgcagacgtgtaaatgttcctgcaaaaacacagactcgcgttgcaaggcgaggcagcttgagttaaacgaacgtacttgcagatgtgacaagccgaggcggtgatgaatga

SEQ ID NO: 5 - DNA, 2250 bp, Mus musculus
tgagccaggctggcaggaaggagcctccctcagggtttcgggaaccagacctctcaccggaaagaccgattaaccatgtcaccaccacgccatcatcgtcaccgttgacagaacagtccttaatccagaaagcctgacatgaaggaagaggagactcttcgaggagcactttgggtccggagggcgagactccggcagacgcattcccgggcaggtgaccaagcacggtccctcgtgggactggattcgccattttcttatatctgctgctaaatcgccaagcccggaagattagggttgtttctgggattcctgtagacacacccacccacatacacacatatatatatattatatatataaataaatatatatgttttatatataaaatatatatatattcttttttttaaattaactctgctaatgttattggtgtcttcactggatatgtttgactgctgtggacttgtgttgggaggaggatgtcctcactcggatgccgacatgggagacaatgggatgaaaggcttcagtgtggtctgagagaggccgaagtccttttgcctgccggggagcaagcaaggccagggcacgggggcacattggctcacttccagaaacacgacaaacccattcctggccctgagtcaagaggacagagagacagatgatgacacagaaagagataaagatgccggttccaaccagaagtttggggagcctcaggacatggcatgctttgtggatccccatgatagtctacaaaagcaccccgcccctctgggcactgcctggaagaatcgggagcctggccagccttcagctcgctcctccacttctgaggggcctaggaggcctcccacaggtgtcccggcaagagaagacacggtggtggaagaagaggcctggtaatggcccctcctcctgggaccccttcgtcctctccttaccccacctcctgggtacagcccaggaggaccttgtgtgatcagaccattgaaaccactaattctgtccccaggagacttggctctgtgtgtgagtggcttacccttcctcatcttcccttcccaaggcacagagcaatggggcaggacccgcaagcccctcacggaggcagagaaaagagaaagtgttttatatacggtacttatttaatagccctttttaattagaaattaaaacagttaatttaattaaagagtagggtttttttcagtattcttggttaatatttaatttcaactatttatgagatgtatctctcgctctctcttatttgtacttatgtgtgtgtgtgtgtgtgtgtgtgtgtgtgtgtgtgtgtgtatgaaatctgtgtttccaatctctctctcccagatcggtgacagtcactagcttgtcctgagaagatatttaattttgctaacactcagctctgccctcccttgtccccaccacacattcctttgaaataaggtttcaatatacatttacatactatatatatatttggcaacttgtgtttgtatataaatatatatatatatatatgtttatgtatatatgtgattctgataaaatagacattgctattctgttttttatatgtaaaaacaaaacaagaaaaatagagaattctacatactaaatctctctccttttttaattttaatatttgttatcatttatttattggtgctactgtttatccgtaataattgtgggggaaaaagatattaacatcacgtctttgtctctagagcagttttccgagatattccgtagtacatatttatttttaaacagcaacaaagaaatacagatatatcttaaaaaaaaagcattttgtattaaagaattgaattctgatctcaaagctctccctggtctctccttctctcctgggccctcctgtctcgctttccctcctcctttggggtacatagtttttgtcttaggtttgagaagcagtccctggagtagaatatggggtgacccatccattcctgggcggaggggagatggctcctttgccaagggtcctcacactacgtggtactctgttccttgtcagacaaggatgggggcatgtctccaggtgctaactggagatcggagagagctgttggctgcagctggccaggatttgggcatgccggggacatgggaggctgtgagcccagcatgcagtttacttctgggtgctaaatggaagagtccagtaaaaagagtcttgcccatgggattccattccgctttgtg

SEQ ID NO: 6 - DNA, 1137 bp, Homo sapiens
atgctcattgtccagactggggtcagatcagcaaacaaagggcctctgatggtgattgttgaatattgcaaatatggaaatctatccaactacctcaagagcaaatatgacttattttttctcgacaaggatgtggcatcacacatggagcgtaagaaagaaaaaatggagccaggcctggaacaaggcaagaaaccaaaactagatagcatcaccagcagcgagagctttgggagctccaagtttcaggaagataaaaatctgagtgatgttgaggaagaggaggattctgatggtttctaccaggagcccatcactatggaagatctgatttcttacagttttcaagtggccagaggcatgaagtttctgtcttccagaaagtgcattcattgggacctggcagcaagaaacattcttttatctgagaacaatgtggtgaagatttgtgattttggccttgcccaggatatttacaagaacgccgattatgtgagaaaaggaggtgggtctccatacccaggagtgcaaatggatgagcacttctgcagttgcctgagggaaggcatgaggatgagagctgctgagtactccactcctgaaatctatcagatcatgctggactgcaggcacaaagacccaaaagaaaggccaagatttgcagaacttgtggaaaaactagaaaatagtgggtttacatactcaactcctgccttctctgaggacttcttcaaggaaggtatttcagctcccaagtttagttcaggaagctctgatgatgtcagatacgtaaatgctttcaagttcatgagcctggaaagaatcaaaacctttgaagaacttttgccaaatgccacctccatgtttgatgactaccagggggacagcagcgctctgctggcctctcccatgctgaagcgcttcaccaggactgacagcaaacccaaggcctcgctcaagattgacttgagactaactagcaaaagtaagaagtcggggctttctgatgtcagcaggcccagtttctgccattccaacagtgggcacatcagcaaaggcaagggcaggttcacctacgacaacgccgagctggaaaggaagacggcgtgctgctccccgcccctctgggagttgtag

SEQ ID NO: 7 - DNA, 5830 bp, Homo sapiens
actgagtcccgggaccccgggagagcggtcagtgtgtggtcgctgcgtttcctctgcctgcgccgggcatcacttgcgcgccgcagaaagtccgtctggcagcctggatatcctctcctaccggcacccgcagacgcccctgcagccgccggtcggcgcccgggctccctagccctgtgcgctcaactgtcctgcgctgcggggtgccgcgagttccacctccgcgcctccttctctagacaggcgctgggagaaagaaccggctcccgagttctgggcatttcgcccggctcgaggtgcaggatgcagagcaaggtgctgctggccgtcgccctgtggctctgcgtggagacccgggccgcctctgtgggtttgcctagtgtttctcttgatctgcccaggctcagcatacaaaaagacatacttacaattaaggctaatacaactcttcaaattacttgcaggggacagagggacttggactggctttggcccaataatcagagtggcagtgagcaaagggtggaggtgactgagtgcagcgatggcctcttctgtaagacactcacaattccaaaagtgatcggaaatgacactggagcctacaagtgcttctaccgggaaactgacttggcctcggtcatttatgtctatgttcaagattacagatctccatttattgcttctgttagtgaccaacatggagtcgtgtacattactgagaacaaaaacaaaactgtggtgattccatgtctcgggtccatttcaaatctcaacgtgtcactttgtgcaagatacccagaaaagagatttgttcctgatggtaacagaatttcctgggacagcaagaagggctttactattcccagctacatgatcagctatgctggcatggtcttctgtgaagcaaaaattaatgatgaaagttaccagtctattatgtacatagttgtcgttgtagggtataggatttatgatgtggttctgagtccgtctcatggaattgaactatctgttggagaaaagcttgtcttaaattgtacagcaagaactgaactaaatgtggggattgacttcaactgggaatacccttcttcgaagcatcagcataagaaacttgtaaaccgagacctaaaaacccagtctgggagtgagatgaagaaatttttgagcaccttaactatagatggtgtaacccggagtgaccaaggattgtacacctgtgcagcatccagtgggctgatgaccaagaagaacagcacatttgtcagggtccatgaaaaaccttttgttgcttttggaagtggcatggaatctctggtggaagccacggtgggggagcgtgtcagaatccctgcgaagtaccttggttacccacccccagaaataaaatggtataaaaatggaataccccttgagtccaatcacacaattaaagcggggcatgtactgacgattatggaagtgagtgaaagagacacaggaaattacactgtcatccttaccaatcccatttcaaaggagaagcagagccatgtggtctctctggttgtgtatgtcccaccccagattggtgagaaatctctaatctctcctgtggattcctaccagtacggcaccactcaaacgctgacatgtacggtctatgccattcctcccccgcatcacatccactggtattggcagttggaggaagagtgcgccaacgagcccagccaagctgtctcagtgacaaacccatacccttgtgaagaatggagaagtgtggaggacttccagggaggaaataaaattgaagttaataaaaatcaatttgctctaattgaaggaaaaaacaaaactgtaagtacccttgttatccaagcggcaaatgtgtcagctttgtacaaatgtgaagcggtcaacaaagtcgggagaggagagagggtgatctccttccacgtgaccaggggtcctgaaattactttgcaacctgacatgcagcccactgagcaggagagcgtgtctttgtggtgcactgcagacagatctacgtttgagaacctcacatggtacaagcttggcccacagcctctgccaatccatgtgggagagttgcccacacctgtttgcaagaacttggatactctttggaaattgaatgccaccatgttctctaatagcacaaatgacattttgatcatggagcttaagaatgcatccttgcaggaccaaggagactatgtctgccttgctcaagacaggaagaccaagaaaagacattgcgtggtcaggcagctcacagtcctagagcgtgtggcacccacgatcacaggaaacctggagaatcagacgacaagtattggggaaagcatcgaagtctcatgcacggcatctgggaatccccctccacagatcatgtggtttaaagataatgagacccttgtagaagactcaggcattgtattgaaggatgggaaccggaacctcactatccgcagagtgaggaaggaggacgaaggcctctacacctgccaggcatgcagtgttcttggctgtgcaaaagtggaggcatttttcataatagaaggtgcccaggaaaagacgaacttggaaatcattattctagtaggcacggcggtgattgccatgttcttctggctacttcttgtcatcatcctacggaccgttaagcgggccaatggaggggaactgaagacaggctacttgtccatcgtcatggatccagatgaactcccattggatgaacattgtgaacgactgccttatgatgccagcaaatgggaattccccagagaccggctgaagctaggtaagcctcttggccgtggtgcctttggccaagtgattgaagcagatgcctttggaattgacaagacagcaacttgcaggacagtagcagtcaaaatgttgaaagaaggagcaacacacagtgagcatcgagctctcatgtctgaactcaagatcctcattcatattggtcaccatctcaatgtggtcaaccttctaggtgcctgtaccaagccaggagggccactcatggtgattgtggaattctgcaaatttggaaacctgtccacttacctgaggagcaagagaaatgaatttgtcccctacaagaccaaaggggcacgattccgtcaagggaaagactacgttggagcaatccctgtggatctgaaacggcgcttggacagcatcaccagtagccagagctcagccagctctggatttgtggaggagaagtccctcagtgatgtagaagaagaggaagctcctgaagatctgtataaggacttcctgaccttggagcatctcatctgttacagcttccaagtggctaagggcatggagttcttggcatcgcgaaagtgtatccacagggacctggcggcacgaaatatcctcttatcggagaagaacgtggttaaaatctgtgactttggcttggcccgggatatttataaagatccagattatgtcagaaaaggagatgctcgcctccctttgaaatggatggccccagaaacaatttttgacagagtgtacacaatccagagtgacgtctggtcttttggtgttttgctgtgggaaatattttccttaggtgcttctccatatcctggggtaaagattgatgaagaattttgtaggcgattgaaagaaggaactagaatgagggcccctgattatactacaccagaaatgtaccagaccatgctggactgctggcacggggagcccagtcagagacccacgttttcagagttggtggaacatttgggaaatctcttgcaagctaatgctcagcaggatggcaaagactacattgttcttccgatatcagagactttgagcatggaagaggattctggactctctctgcctacctcacctgtttcctgtatggaggaggaggaagtatgtgaccccaaattccattatgacaacacagcaggaatcagtcagtatctgcagaacagtaagcgaaagagccggcctgtgagtgtaaaaacatttgaagatatcccgttagaagaaccagaagtaaaagtaatcccagatgacaaccagacggacagtggtatggttcttgcctcagaagagctgaaaactttggaagacagaaccaaattatctccatcttttggtggaatggtgcccagcaaaagcagggagtctgtggcatctgaaggctcaaaccagacaagcggctaccagtccggatatcactccgatgacacagacaccaccgtgtactccagtgaggaagcagaacttttaaagctgatagagattggagtgcaaaccggtagcacagcccagattctccagcctgactcggggaccacactgagctctcctcctgtttaaaaggaagcatccacaccccaactcccggacatcacatgagaggtctgctcagattttgaagtgttgttctttccaccagcaggaagtagccgcatttgattttcatttcgacaacagaaaaaggacctcggactgcagggagccagtcttctaggcatatcctggaagaggcttgtgacccaagaatgtgtctgtgtcttctcccagtgttgacctgatcctcttttttcattcatttaaaaagcattatcatgcccctgctgcgggtctcaccatgggtttagaacaaagagcttcaagcaatggccccatcctcaaagaagtagcagtacctggggagctgacacttctgtaaaactagaagataaaccaggcaacgtaagtgttcgaggtgttgaagatgggaaggatttgcagggctgagtctatccaagaggctttgtttaggacgtgggtcccaagccaagccttaagtgtggaattcggattgatagaaaggaagactaacgttaccttgctttggagagtactggagcctgcaaatgcattgtgtttgctctggtggaggtgggcatggggtctgttctgaaatgtaaagggttcagacggggtttctggttttagaaggttgcgtgttcttcgagttgggctaaagtagagttcgttgtgctgtttctgactcctaatgagagttccttccagaccgttagctgtctccttgccaagccccaggaagaaaatgatgcagctctggctccttgtctcccaggctgatcctttattcagaataccacaaagaaaggacattcagctcaaggctccctgccgtgttgaagagttctgactgcacaaaccagcttctggtttcttctggaatgaataccctcatatctgtcctgatgtgatatgtctgagactgaatgcgggaggttcaatgtgaagctgtgtgtggtgtcaaagtttcaggaaggattttacccttttgttcttccccctgtccccaacccactctcaccccgcaacccatcagtattttagttatttggcctctactccagtaaacctgattgggtttgttcactctctgaatgattattagccagacttcaaaattattttatagcccaaattataacatctattgtattatttagacttttaacatatagagctatttctactgatttttgcccttgttctgtcctttttttcaaaaaagaaaatgtgttttttgtttggtaccatagtgtgaaatgctgggaacaatgactataagacatgctatggcacatatatttatagtctgtttatgtagaaacaaatgtaatatattaaagccttatatataatgaactttgtactattcacattttgtatcagtattatgtagcataacaaaggtcataatgctttcagcaattgatgtcattttattaaagaacattgaaaaacttga

SEQ ID NO: 8 - DNA, 2964 bp, Homo sapiens
ggccgtccctggcggcggagatggcggcgacagcggcggaggctgtgacctctggctctggagagccccgggaggaggctggagccctcggccccgcctggcatgaatcccagttgcgcagttatagcttcccgactaggcccattccgcgtctgagtcagagcgacccccgggcagaggagcttattgagaatgaggagcctgtggtgctgaccgacacaaatcttgtgtatcctgccctgaaatgggaccttgaatacctgcaagagaatattggcaatggagacttctctgtgtacagtgccagcacccacaagttcttgtactatgatgagaagaagatggccaatttccagaactttaagccgaggtccaacagggaagaaatgaaatttcatgagttcgttgagaaactgcaggatatacagcagcgaggaggggaagagaggttgtatctgcagcaaacgctcaatgacactgtgggcgggaagattgtcatggacttcttaggttttaactggaactggattaataagcaacagggaaagcgtggctgggggcagcttacctctaacctgctgctcattggcatggaaggaaatgtgacacctgctcactatgatgagcagcagaacttttttgctcagataaaaggttacaaacgatgcatcttattccctccggatcagttcgagtgcctctacccataccctgttcatcacccatgtgacagacagagccaggtggactttgacaatcccgactacgagaggttccctaatttccaaaatgtggttggttacgaaacagtggttggccctggtgatgttctttacatcccaatgtactggtggcatcacatagagtcattactaaatggggggattaccatcactgtgaacttctggtataagggggctcccacccctaagagaattgaatatcctctcaaagctcatcagaaagtggccataatgagaaacattgagaagatgcttggagaggccttggggaacccacaagaggtggggcccttgttgaacacaatgatcaagggccggtacaactagcctgccaggggtcaaggcctcctgccaggtgactgctatcccgtccacaccgcttcattgatgaggacaggagactccaagcgctagtattgcacgctgcacttaatggactggactcttgccatggcccaggagtcaggtgtttggagcgaggcagggcagttggcactccactcctatttggagggacttcatacccttgcctcttgtgccccagcaccttctctctctgccccccgcctaaagtcctgcattcagtgtgtggagtcccagcttttggttgtcatcatgtctgtgtgtatgttagtctgtcaacttcggaatgtgtgcgtgtgtgtgcatgcacacgcatgtatgtatctgttccctgttccttctgggtcaggctgtcacttccggctctcggccctatctcctgcaacctcagtgcctcagcctgagagagagatgagatgctcttggactccccactgcatctgggctgcagggccagagctagtctgaccattaggtcagtctgcctcctgacagtttttgcgtagtcaagctctaggcggtatgggaatggctaccgggactctaatggggtgaaagagaggggaggcttgcctttgagagcctatatagccttcctgtgagagaggattagatagggttccaactgggcctacaagctcaagccatacataaaaggaccttgggacataagaaccaatgattgtgcataagttctaaattagagacacatatagtttctctctttcagcaccagctcttgcccctatgctgggtaccaagggagttctcctagctgtggcttctctaggttctaggggtgcaagcctctgtgtgtttgtttgtgtgtgtctgtgtgtgcgtatccacactaggggtgcaagcctctgggtgtgtgtgtgtgtgtgcgtgcgtgtgtgtgtgtgtgtccgtgtgtgtgtgtgtgtgtccacactggccagcctccctacttaccaaggttctccactgcttaccttttccagtgggacagtacagtgtgagcccccgggaagtactgcctgacctatcctaagcttttacacttggattttagccatcatatgttggccaggtttcactgcagcctgcccgaggctaactggctagagcctccaggccctatgatgctccctgcccaggccatatcctttattcctgctgagcttcctggctgaatagatgaaatggggtcaagcccaggcagctcattcactatctgtgatccacctcagggcacgggcaaacacataggcttgcgtcttaaagccagctcctctgccagaccccgttgtaatgtgccacaacaccctcaatagtcagggcaactggtggagcatggaagtcgaatttccttttctgttaggagctactcctgggaacccctctcagggctgcagcttacaggtgggcagctgtgattgcacaacttgaagggccatcattcacatctattcagtgggagtggggtccctgggattgggcagtgtggtggccctgtgtctcctcacctctgctcctgtcttcatcaccttctctctggaagggaagaggagttggaaggtctctggttttcttttctttttttttttttgccaaaggtttacttccagcatctgagctctggctctcacccctgaagctcagttatagtgcactgatgaactgagaggatgcgtgtggatgtgtgtgcatgcctgagtgcgttttttggggaggggtgtttatttttagtaccccattctggggttctctgatgcagtgtggatgtgaagatatggtaccttctcaagtgtagctctttcaaatatagtcaatgctgggaaaaaaaaaaaaaaaaaaaaaaaaaaaaaaaaaaaaa

SEQ ID NO: 9 - DNA, 3958 bp, Homo sapiens
gtgctgcctcgtctgaggggacaggaggatcaccctcttcgtcgcttcggccagtgtgtcgggctgggccctgacaagccacctgaggagaggctcggagccgggcccggaccccggcgattgccgcccgcttctctctagtctcacgaggggtttcccgcctcgcacccccacctctggacttgcctttccttctcttctccgcgtgtggagggagccagcgcttaggccggagcgagcctgggggccgcccgccgtgaagacatcgcggggaccgattcaccatggagggcgccggcggcgcgaacgacaagaaaaagataagttctgaacgtcgaaaagaaaagtctcgagatgcagccagatctcggcgaagtaaagaatctgaagttttttatgagcttgctcatcagttgccacttccacataatgtgagttcgcatcttgataaggcctctgtgatgaggcttaccatcagctatttgcgtgtgaggaaacttctggatgctggtgatttggatattgaagatgacatgaaagcacagatgaattgcttttatttgaaagccttggatggttttgttatggttctcacagatgatggtgacatgatttacatttctgataatgtgaacaaatacatgggattaactcagtttgaactaactggacacagtgtgtttgattttactcatccatgtgaccatgaggaaatgagagaaatgcttacacacagaaatggccttgtgaaaaagggtaaagaacaaaacacacagcgaagcttttttctcagaatgaagtgtaccctaactagccgaggaagaactatgaacataaagtctgcaacatggaaggtattgcactgcacaggccacattcacgtatatgataccaacagtaaccaacctcagtgtgggtataagaaaccacctatgacctgcttggtgctgatttgtgaacccattcctcacccatcaaatattgaaattcctttagatagcaagactttcctcagtcgacacagcctggatatgaaattttcttattgtgatgaaagaattaccgaattgatgggatatgagccagaagaacttttaggccgctcaatttatgaatattatcatgctttggactctgatcatctgaccaaaactcatcatgatatgtttactaaaggacaagtcaccacaggacagtacaggatgcttgccaaaagaggtggatatgtctgggttgaaactcaagcaactgtcatatataacaccaagaattctcaaccacagtgcattgtatgtgtgaattacgttgtgagtggtattattcagcacgacttgattttctcccttcaacaaacagaatgtgtccttaaaccggttgaatcttcagatatgaaaatgactcagctattcaccaaagttgaatcagaagatacaagtagcctctttgacaaacttaagaaggaacctgatgctttaactttgctggccccagccgctggagacacaatcatatctttagattttggcagcaacgacacagaaactgatgaccagcaacttgaggaagtaccattatataatgatgtaatgctcccctcacccaacgaaaaattacagaatataaatttggcaatgtctccattacccaccgctgaaacgccaaagccacttcgaagtagtgctgaccctgcactcaatcaagaagttgcattaaaattagaaccaaatccagagtcactggaactttcttttaccatgccccagattcaggatcagacacctagtccttccgatggaagcactagacaaagttcacctgagcctaatagtcccagtgaatattgtttttatgtggatagtgatatggtcaatgaattcaagttggaattggtagaaaaactttttgctgaagacacagaagcaaagaacccattttctactcaggacacagatttagacttggagatgttagctccctatatcccaatggatgatgacttccagttacgttccttcgatcagttgtcaccattagaaagcagttccgcaagccctgaaagcgcaagtcctcaaagcacagttacagtattccagcagactcaaatacaagaacctactgctaatgccaccactaccactgccaccactgatgaattaaaaacagtgacaaaagaccgtatggaagacattaaaatattgattgcatctccatctcctacccacatacataaagaaactactagtgccacatcatcaccatatagagatactcaaagtcggacagcctcaccaaacagagcaggaaaaggagtcatagaacagacagaaaaatctcatccaagaagccctaacgtgttatctgtcgctttgagtcaaagaactacagttcctgaggaagaactaaatccaaagatactagctttgcagaatgctcagagaaagcgaaaaatggaacatgatggttcactttttcaagcagtaggaattggaacattattacagcagccagacgatcatgcagctactacatcactttcttggaaacgtgtaaaaggatgcaaatctagtgaacagaatggaatggagcaaaagacaattattttaataccctctgatttagcatgtagactgctggggcaatcaatggatgaaagtggattaccacagctgaccagttatgattgtgaagttaatgctcctatacaaggcagcagaaacctactgcagggtgaagaattactcagagctttggatcaagttaactgagctttttcttaatttcattcctttttttggacactggtggctcactacctaaagcagtctatttatattttctacatctaattttagaagcctggctacaatactgcacaaacttggttagttcaatttttgatcccctttctacttaatttacattaatgctcttttttagtatgttctttaatgctggatcacagacagctcattttctcagttttttggtatttaaaccattgcattgcagtagcatcattttaaaaaatgcacctttttatttatttatttttggctagggagtttatccctttttcgaattatttttaagaagatgccaatataatttttgtaagaaggcagtaacctttcatcatgatcataggcagttgaaaaatttttacaccttttttttcacattttacataaataataatgctttgccagcagtacgtggtagccacaattgcacaatatattttcttaaaaaataccagcagttactcatggaatatattctgcgtttataaaactagtttttaagaagaaattttttttggcctatgaaattgttaaacctggaacatgacattgttaatcatataataatgattcttaaatgctgtatggtttattatttaaatgggtaaagccatttacataatatagaaagatatgcatatatctagaaggtatgtggcatttatttggataaaattctcaattcagagaaatcatctgatgtttctatagtcactttgccagctcaaaagaaaacaataccctatgtagttgtggaagtttatgctaatattgtgtaactgatattaaacctaaatgttctgcctaccctgttggtataaagatattttgagcagactgtaaacaagaaaaaaaaaatcatgcattcttagcaaaattgcctagtatgttaatttgctcaaaatacaatgtttgattttatgcactttgtcgctattaacatcctttttttcatgtagatttcaataattgagtaattttagaagcattattttaggaatatatagttgtcacagtaaatatcttgttttttctatgtacattgtacaaatttttcattccttttgctctttgtggttggatctaacactaactgtattgttttgttacatcaaataaacatcttctgtggaccaggaaaaaaaaaaaaaaaaaaa

SEQ ID NO: 10 - DNA, 3812 bp, Homo sapiens
gtgctgcctcgtctgaggggacaggaggatcaccctcttcgtcgcttcggccagtgtgtcgggctgggccctgacaagccacctgaggagaggctcggagccgggcccggaccccggcgattgccgcccgcttctctctagtctcacgaggggtttcccgcctcgcacccccacctctggacttgcctttccttctcttctccgcgtgtggagggagccagcgcttaggccggagcgagcctgggggccgcccgccgtgaagacatcgcggggaccgattcaccatggagggcgccggcggcgcgaacgacaagaaaaagataagttctgaacgtcgaaaagaaaagtctcgagatgcagccagatctcggcgaagtaaagaatctgaagttttttatgagcttgctcatcagttgccacttccacataatgtgagttcgcatcttgataaggcctctgtgatgaggcttaccatcagctatttgcgtgtgaggaaacttctggatgctggtgatttggatattgaagatgacatgaaagcacagatgaattgcttttatttgaaagccttggatggttttgttatggttctcacagatgatggtgacatgatttacatttctgataatgtgaacaaatacatgggattaactcagtttgaactaactggacacagtgtgtttgattttactcatccatgtgaccatgaggaaatgagagaaatgcttacacacagaaatggccttgtgaaaaagggtaaagaacaaaacacacagcgaagcttttttctcagaatgaagtgtaccctaactagccgaggaagaactatgaacataaagtctgcaacatggaaggtattgcactgcacaggccacattcacgtatatgataccaacagtaaccaacctcagtgtgggtataagaaaccacctatgacctgcttggtgctgatttgtgaacccattcctcacccatcaaatattgaaattcctttagatagcaagactttcctcagtcgacacagcctggatatgaaattttcttattgtgatgaaagaattaccgaattgatgggatatgagccagaagaacttttaggccgctcaatttatgaatattatcatgctttggactctgatcatctgaccaaaactcatcatgatatgtttactaaaggacaagtcaccacaggacagtacaggatgcttgccaaaagaggtggatatgtctgggttgaaactcaagcaactgtcatatataacaccaagaattctcaaccacagtgcattgtatgtgtgaattacgttgtgagtggtattattcagcacgacttgattttctcccttcaacaaacagaatgtgtccttaaaccggttgaatcttcagatatgaaaatgactcagctattcaccaaagttgaatcagaagatacaagtagcctctttgacaaacttaagaaggaacctgatgctttaactttgctggccccagccgctggagacacaatcatatctttagattttggcagcaacgacacagaaactgatgaccagcaacttgaggaagtaccattatataatgatgtaatgctcccctcacccaacgaaaaattacagaatataaatttggcaatgtctccattacccaccgctgaaacgccaaagccacttcgaagtagtgctgaccctgcactcaatcaagaagttgcattaaaattagaaccaaatccagagtcactggaactttcttttaccatgccccagattcaggatcagacacctagtccttccgatggaagcactagacaaagttcacctgagcctaatagtcccagtgaatattgtttttatgtggatagtgatatggtcaatgaattcaagttggaattggtagaaaaactttttgctgaagacacagaagcaaagaacccattttctactcaggacacagatttagacttggagatgttagctccctatatcccaatggatgatgacttccagttacgttccttcgatcagttgtcaccattagaaagcagttccgcaagccctgaaagcgcaagtcctcaaagcacagttacagtattccagcagactcaaatacaagaacctactgctaatgccaccactaccactgccaccactgatgaattaaaaacagtgacaaaagaccgtatggaagacattaaaatattgattgcatctccatctcctacccacatacataaagaaactactagtgccacatcatcaccatatagagatactcaaagtcggacagcctcaccaaacagagcaggaaaaggagtcatagaacagacagaaaaatctcatccaagaagccctaacgtgttatctgtcgctttgagtcaaagaactacagttcctgaggaagaactaaatccaaagatactagctttgcagaatgctcagagaaagcgaaaaatggaacatgatggttcactttttcaagcagtaggaattatttagcatgtagactgctggggcaatcaatggatgaaagtggattaccacagctgaccagttatgattgtgaagttaatgctcctatacaaggcagcagaaacctactgcagggtgaagaattactcagagctttggatcaagttaactgagctttttcttaatttcattcctttttttggacactggtggctcactacctaaagcagtctatttatattttctacatctaattttagaagcctggctacaatactgcacaaacttggttagttcaatttttgatcccctttctacttaatttacattaatgctcttttttagtatgttctttaatgctggatcacagacagctcattttctcagttttttggtatttaaaccattgcattgcagtagcatcattttaaaaaatgcacctttttatttatttatttttggctagggagtttatccctttttcgaattatttttaagaagatgccaatataatttttgtaagaaggcagtaacctttcatcatgatcataggcagttgaaaaatttttacaccttttttttcacattttacataaataataatgctttgccagcagtacgtggtagccacaattgcacaatatattttcttaaaaaataccagcagttactcatggaatatattctgcgtttataaaactagtttttaagaagaaattttttttggcctatgaaattgttaaacctggaacatgacattgttaatcatataataatgattcttaaatgctgtatggtttattatttaaatgggtaaagccatttacataatatagaaagatatgcatatatctagaaggtatgtggcatttatttggataaaattctcaattcagagaaatcatctgatgtttctatagtcactttgccagctcaaaagaaaacaataccctatgtagttgtggaagtttatgctaatattgtgtaactgatattaaacctaaatgttctgcctaccctgttggtataaagatattttgagcagactgtaaacaagaaaaaaaaaatcatgcattcttagcaaaattgcctagtatgttaatttgctcaaaatacaatgtttgattttatgcactttgtcgctattaacatcctttttttcatgtagatttcaataattgagtaattttagaagcattattttaggaatatatagttgtcacagtaaatatcttgttttttctatgtacattgtacaaatttttcattccttttgctctttgtggttggatctaacactaactgtattgttttgttacatcaaataaacatcttctgtggaccagg

SEQ ID NO: 11 - DNA, 3718 bp, Rattus norvegicus
gacaccgcgggcaccgattcgccatggagggcgccggcggcgagaacgagaagaaaaataggatgagttccgaacgtcgaaaagaaaagtctagggatgcagcacgatctcggcgaagcaaagagtctgaagttttttatgagcttgctcatcagttgccacttccccacaacgtgagctcccatcttgataaagcttctgttatgaggctcaccatcagttacttacgtgtgaggaaacttctaggtgctggtgatcttgacattgaagatgaaatgaaagcacagatgaactgcttttatctgaaagccctggatggctttgttatggtgctaacagatgatggtgacatgatttacatttctgataacgtgaacaaatacatggggttgactcagtttgaactaactggacacagtgtgtttgattttacccatccatgtgaccatgaggaaatgagagaaatgcttacacacagaaatggcccagtgagaaaggggaaagaacaaaacacgcagcgaagcttttttctcagaatgaaatgtaccctaacaagccgggggaggacgatgaacatcaagtcagcaacgtggaaggtgctgcactgcacaggccacattcatgtgtatgataccagcagtaaccagccgcagtgtggctacaagaaaccgcctatgacgtgcttggtgctgatttgtgaacccattcctcatccatcaaacattgaaattcctttagacagcaagacatttctcagtcgacacagcctcgatatgaaattttcttactgtgatgaaaggattactgagttgatgggttatgagccagaagaacttttgggccgttcaatttatgaatattatcatgctttggactctgatcatctgaccaaaactcatcatgacatgtttactaaaggacaagtcaccacaggacagtacaggatgcttgcaaaaagaggtggatatgtctgggttgagactcaagcaactgttatatataatacgaagaactctcagccacagtgcattgtgtgtgtgaattatgttgtaagtggtattattcagcacgacttgattttctcccttcaacaaacagaatctgtcctcaaaccagttgaatcttcagatatgaaaatgacccagctgttcactaaagtggaatctgaggacacgagctgcctcttcgacaagcttaagaaagagcccgatgccctgactctgctagctccagcggctggggacacgatcatatcactggacttcggcagcgatgacacggaaactgaagaccaacaacttgaagatgtcccgttgtacaatgatgtaatgttcccctcttctaatgagaaattaaatataaatctggcaatgtctccattacctgcctctgaaactccaaagccacttcgaagtagtgctgatcctgcactgaatcaagaggttgcattgaagttagagtcaagcccagagtcactgggactttcttttaccatgccccagattcaagatcagccagcaagtccttctgatggaagcactagacaaagctcacctgagcctaacagtcccagtgagtactgctttgatgtggacagcgatatggtcaatgtattcaagttggaactggtggaaaaactgtttgctgaagacacagaagcgaagaatccattttcagctcaggacactgatttagacttggaaatgctggctccctatatcccaatggatgatgatttccagttacgttcctttgatcagttgtcaccattagagagcaattctccaagccctccgagtgtgagcacagttacaggattccagcagacccagttacagaaacctaccatcactgtcactgccaccgcaactgccaccactgatgaatcaaaagcagtgacgaaggacaatatagaagacattaaaatactgattgcatctccaccttctacccaagtacctcaagaaatgaccactgctaaggcatcagcatacagtggtactcacagtcggacagcctcaccagacagagcaggaaagagagtcatagaaaaaacagacaaagctcatccaaggagccttaacctatctgtcactttgaatcaaagaaatactgttcctgaagaagaattaaacccaaagacaatagctttgcagaatgctcagaggaagcgaaaaatggaacatgatggctccctttttcaagcagcaggaattggaacgttactgcagcaaccaggtgaccgtgcccctactatgtcgctttcttggaaacgagtgaaaggatacatatctagtgaacaggatggaatggagcagaagacaatttttttaataccctctgatttagcatgtagactgctggggcagtcaatggatgagagtggattaccacagctgaccagttacgattgtgaagttaatgctcccatacaaggcagcagaaacctactgcagggtgaagaattactcagagctttggatcaagttaactgagcttttcctaatctcattcctttgattgttaatttttgtgttcagttgttgttgttgtctgtggggtttcgtttctgttggttgttttggacactggtggctcagcagtctatttatattttctatatctcatttagaggcctggctacagtactgcaccaactcagatagtttagtttgggccccttcctccttcattttcactgatgctctttttaccatgtccttcgaatgccagatcacagcacattcacagctccccagcatttcaccaatgcattgctgtagtgtcgtttaaaatgcacctttttatttatttatttttggtgagggagtttgtcccttattgaattatttttaatgaaatgccaatataattttttaagaaggcagtaaatcttcatcatgatgataggcagttgaaaattttttactcatttttttcatgttttacatgaaaataatgctttgccagcagtacatggtagccacaattgcacaatatattttcttaaaaataccagcagttactcatgcatatattctgcatttataaaactagtttttaagaagaaactttttttggcctatggaattgttaagcctggatcatgatgctgttgatcttataatgattcttaaactgtatggtttctttatatgggtaaagccatttacatgatatagagagatatgcttatatctggaaggtatatggcatttatttggataaaattctcaattgagaagttatctggtgtttctttactttaccggctcaaaagaaaacagtccctatgtagttgtggaagcttatgctaatattgtgtaattgatattaaacattaaatgttctgcctatcctgttggtataaagacattttgagcatactgtaaacaaaaaaatcatgcattgttagtaaaattgcctagtatgttaatttgttgaaaatacgatgtttggttttatgcactttgtcgctattaacatcctttttttcatatagatttcaataattgagtaattttagaagcattattttagaaatatagagttgtcatagtaaacatcttgtttttttttctttttttctatgtacattgtataaatttttcattcccttgctctttgtagttgggtctaacactaactgtactgttttgttatatcaaataaacatcttctgtggaccaggaaaaaaaaaaaaaaaaaaaaaaaaaaa

SEQ ID NO: 12 - DNA, 3973 bp, Mus musculus
cgcgaggactgtcctcgccgccgtcgcgggcagtgtctagccaggccttgacaagctagccggaggagcgcctaggaacccgagccggagctcagcgagcgcagcctgcacgcccgcctcgcgtcccgggggggtcccgcctcccaccccgcctctggacttgtctctttccccgcgcgcgcggacagagccggcgtttaggcccgagcgagcccgggggccgccggccgggaagacaacgcgggcaccgattcgccatggagggcgccggcggcgagaacgagaagaaaaagatgagttctgaacgtcgaaaagaaaagtctagagatgcagcaagatctcggcgaagcaaagagtctgaagttttttatgagcttgctcatcagttgccacttccccacaatgtgagctcacatcttgataaagcttctgttatgaggctcaccatcagttatttacgtgtgagaaaacttctggatgccggtggtctagacagtgaagatgagatgaaggcacagatggactgtttttatctgaaagccctagatggctttgtgatggtgctaacagatgacggcgacatggtttacatttctgataacgtgaacaaatacatggggttaactcagtttgaactaactggacacagtgtgtttgattttactcatccatgtgaccatgaggaaatgagagaaatgcttacacacagaaatggcccagtgagaaaagggaaagaactaaacacacagcggagcttttttctcagaatgaagtgcaccctaacaagccgggggaggacgatgaacatcaagtcagcaacgtggaaggtgcttcactgcacgggccatattcatgtctatgataccaacagtaaccaacctcagtgtgggtacaagaaaccacccatgacgtgcttggtgctgatttgtgaacccattcctcatccgtcaaatattgaaattcctttagatagcaagacatttctcagtcgacacagcctcgatatgaaattttcttactgtgatgaaagaattactgagttgatgggttatgagccggaagaacttttgggccgctcaatttatgaatattatcatgctttggattctgatcatctgaccaaaactcaccatgatatgtttactaaaggacaagtcaccacaggacagtacaggatgcttgccaaaagaggtggatatgtctgggttgaaactcaagcaactgtcatatataatacgaagaactcccagccacagtgcattgtgtgtgtgaattatgttgtaagtggtattattcagcacgacttgattttctcccttcaacaaacagaatctgtgctcaaaccagttgaatcttcagatatgaagatgactcagctgttcaccaaagttgaatcagaggatacaagctgcctttttgataagcttaagaaggagcctgatgctctcactctgctggctccagctgccggcgacaccatcatctctctggattttggcagcgatgacacagaaactgaagatcaacaacttgaagatgttccattatataatgatgtaatgtttccctcttctaatgaaaaattaaatataaacctggcaatgtctcctttaccttcatcggaaactccaaagccacttcgaagtagtgctgatcctgcactgaatcaagaggttgcattaaaattagaatcaagtccagagtcactgggactttcttttaccatgccccagattcaagatcagccagcaagtccttctgatggaagcactagacaaagttcacctgagagacttcttcaggaaaacgtaaacactcctaacttttcccagcctaacagtcccagtgaatattgctttgatgtggatagcgatatggtcaatgtattcaagttggaactggtggaaaaactgtttgctgaagacacagaggcaaagaatccattttcaactcaggacactgatttagatttggagatgctggctccctatatcccaatggatgatgatttccagttacgttcctttgatcagttgtcaccattagagagcaattctccaagccctccaagtatgagcacagttactgggttccagcagacccagttacagaaacctaccatcactgccactgccaccacaactgccaccactgatgaatcaaaaacagagacgaaggacaataaagaagatattaaaatactgattgcatctccatcttctacccaagtacctcaagaaacgaccactgctaaggcatcagcatacagtggcactcacagtcggacagcctcaccagacagagcaggaaagagagtcatagaacagacagacaaagctcatccaaggagccttaagctgtctgccactttgaatcaaagaaatactgttcctgaggaagaattaaacccaaagacaatagcttcgcagaatgctcagaggaagcgaaaaatggaacatgatggctccctttttcaagcagcaggaattggaacattattgcagcaaccaggtgactgtgcacctactatgtcactttcctggaaacgagtgaaaggattcatatctagtgaacagaatggaacggagcaaaagactattattttaataccctccgatttagcatgcagactgctggggcagtcaatggatgagagtggattaccacagctgaccagttacgattgtgaagttaatgctcccatacaaggcagcagaaacctactgcagggtgaagaattactcagagctttggatcaagttaactgagcgtttcctaatctcattccttttgattgttaatgtttttgttcagttgttgttgtttgttgggtttttgtttctgttggttatttttggacactggtggctcagcagtctatttatattttctatatctaattttagaagcctggctacaatactgcacaaactcagatagtttagttttcatcccctttctacttaattttcattaatgctctttttaatatgttcttttaatgccagatcacagcacattcacagctcctcagcatttcaccattgcattgctgtagtgtcatttaaaatgcacctttttatttatttatttttggtgagggagtttgtcccttattgaattatttttaatgaaatgccaatataattttttaagaaagcagtaaattctcatcatgatcataggcagttgaaaactttttactcatttttttcatgttttacatgaaaataatgctttgtcagcagtacatggtagccacaattgcacaatatattttctttaaaaaaccagcagttactcatgcaatatattctgcatttataaaactagtttttaagaaattttttttggcctatggaattgttaagcctggatcatgaagcgttgatcttataatgattcttaaactgtatggtttctttatatgggtaaagccatttacatgatataaagaaatatgcttatatctggaaggtatgtggcatttatttggataaaattctcaattcagagaagttatctggtgtttcttgactttaccaactcaaaacagtccctctgtagttgtggaagcttatgctaatattgtgtaattgattatgaaacataaatgttctgcccaccctgttggtataaagacattttgagcatactgtaaacaaacaaacaaaaaatcatgctttgttagtaaaattgcctagtatgttgatttgttgaaaatatgatgtttggttttatgcactttgtcgctattaacatccttttttcatatagatttcaataagtgagtaattttagaagcattattttaggaatatagagttgtcatagtaaacatcttgttttttctatgtacactgtataaatttttcgttcccttgctctttgtggttgggtctaacactaactgtactgttttgttatatcaaataaacatcttctgtggaccaggaaaaaaaaaaaaaaaaaa

SEQ ID NO: 13 - DNA, 2900 bp, Homo sapiens
gcgccccagtcgacgctgagctcctctgctactcagagttgcaacctcagcctcgctatggctcccagcagcccccggcccgcgctgcccgcactcctggtcctgctcggggctctgttcccaggacctggcaatgcccagacatctgtgtccccctcaaaagtcatcctgccccggggaggctccgtgctggtgacatgcagcacctcctgtgaccagcccaagttgttgggcatagagaccccgttgcctaaaaaggagttgctcctgcctgggaacaaccggaaggtgtatgaactgagcaatgtgcaagaagatagccaaccaatgtgctattcaaactgccctgatgggcagtcaacagctaaaaccttcctcaccgtgtactggactccagaacgggtggaactggcacccctcccctcttggcagccagtgggcaagaaccttaccctacgctgccaggtggagggtggggcaccccgggccaacctcaccgtggtgctgctccgtggggagaaggagctgaaacgggagccagctgtgggggagcccgctgaggtcacgaccacggtgctggtgaggagagatcaccatggagccaatttctcgtgccgcactgaactggacctgcggccccaagggctggagctgtttgagaacacctcggccccctaccagctccagacctttgtcctgccagcgactcccccacaacttgtcagcccccgggtcctagaggtggacacgcaggggaccgtggtctgttccctggacgggctgttcccagtctcggaggcccaggtccacctggcactgggggaccagaggttgaaccccacagtcacctatggcaacgactccttctcggccaaggcctcagtcagtgtgaccgcagaggacgagggcacccagcggctgacgtgtgcagtaatactggggaaccagagccaggagacactgcagacagtgaccatctacagctttccggcgcccaacgtgattctgacgaagccagaggtctcagaagggaccgaggtgacagtgaagtgtgaggcccaccctagagccaaggtgacgctgaatggggttccagcccagccactgggcccgagggcccagctcctgctgaaggccaccccagaggacaacgggcgcagcttctcctgctctgcaaccctggaggtggccggccagcttatacacaagaaccagacccgggagcttcgtgtcctgtatggcccccgactggacgagagggattgtccgggaaactggacgtggccagaaaattcccagcagactccaatgtgccaggcttgggggaacccattgcccgagctcaagtgtctaaaggatggcactttcccactgcccatcggggaatcagtgactgtcactcgagatcttgagggcacctacctctgtcgggccaggagcactcaaggggaggtcacccgcaaggtgaccgtgaatgtgctctccccccggtatgagattgtcatcatcactgtggtagcagccgcagtcataatgggcactgcaggcctcagcacgtacctctataaccgccagcggaagatcaagaaatacagactacaacaggcccaaaaagggacccccatgaaaccgaacacacaagccacgcctccctgaacctatcccgggacagggcctcttcctcggccttcccatattggtggcagtggtgccacactgaacagagtggaagacatatgccatgcagctacacctaccggccctgggacgccggaggacagggcattgtcctcagtcagatacaacagcatttggggcccatctgatctgtagtcacatgactaagccaagaggaaggagcaagactcaagacatgattgatggatgttaaagtctagcctgatgagaggggaagtggtgggggagacatagccccaccatgaggacatacaactgggaaatactgaaacttgctgcctattgggtatgctgaggccccacagacttacagaagaagtggccctccatagacatggcactgctgtctactgaccccaacccttgatgatatgtatttattcatttgttattttaccagctatttattgagtgtcttttatgtaggctaaatgaacataggtctctggcctcacggagctcccagtcctaatcacattcaaggtcaccaggtacagttgtacaggttgtacactgcaggagagtgcctggcaaaaagatcaaatggggctgggacttctcattggccaacctgcctttccccagaaggagtgatttttctatcggcacaaaagcactatatggactggtaatggttacaggttcagagattacccagtgaggccttattcctcccttccccccaaaactgacacctttgttagccacctccccacccacatacatttctgccagtgttcacaatgacactcagcggtcatgtctggacatgagtgcccagggaatatgcccaagctatgccttgtcctcttgtcctgtttgcatttcactgggagcttgcactatgcagctccagtttcctgcagtgatcagggtcctgcaagcagtggggaagggggccaaggtattggaggactccctcccagctttggaagcctcatccgcgtgtgtgtgtgtgtgtatgtgtagacaagctctcgctctgtcacccaggctggagtgcagtggtgcaatcatggttcactgcagtcttgaccttttgggctcaagtgatcctcccacctcagcctcctgagtagctgggaccataggctcacaacaccacacctggcaaatttgattttttttttttttccagagacggggtctcgcaacattgcccagacttcctttgtgttagttaataaagctttctcaactgc

SEQ ID NO: 14 - DNA, 1614 bp, Mus musculus
atggcttcaacccgtgccaagcccacgctacctctgctcctggccctggtcaccgttgtgatccctgggcctggtgatgctcaggtatccatccatcccagagaagccttcctgccccagggtgggtccgtgcaggtgaactgttcttcctcatgcaaggaggacctcagcctgggcttggagactcagtggctgaaagatgagctcgagagtggacccaactggaagctgtttgagctgagcgagatcggggaggacagcagtccgctgtgctttgagaactgtggcaccgtgcagtcgtccgcttccgctaccatcaccgtgtattcgtttccggagagtgtggagctgagacctctgccagcctggcagcaagtaggcaaggacctcaccctgcgctgccacgtggatggtggagcaccgcggacccagctctcagcagtgctgctccgtggggaggagatactgagccgccagccagtgggtgggcaccccaaggaccccaaggagatcacattcacggtgctggctagcagaggggaccacggagccaatttctcatgccgcacagaactggatctcaggccgcaagggctggcattgttctctaatgtctccgaggccaggagcctccggactttcgatcttccagctaccatcccaaagctcgacacccctgacctcctggaggtgggcacccagcagaagttgttttgctccctggaaggcctgtttcctgcctctgaagctcggatatacctggagctgggaggccagatgccgacccaggagagcacaaacagcagtgactctgtgtcagccactgccttggtagaggtgactgaggagttcgacagaaccctgccgctgcgctgcgttttggagctagcggaccagatcctggagacgcagaggaccttaacagtctacaacttttcagctccggtcctgaccctgagccagctggaggtctcggaagggagccaagtaactgtgaagtgtgaagcccacagtgggtcgaaggtggttcttctgagcggcgtcgagcctaggccacccaccccgcaggtccaattcacactgaatgccagctcggaggatcacaaacgaagcttcttttgctctgccgctctggaggtggcgggaaagttcctgtttaaaaaccagaccctggaactgcacgtgctgtatggtcctcggctggacgagacggactgcttggggaactggacctggcaagaggggtctcagcagactctgaaatgccaggcctgggggaacccatctcctaagatgacctgcagacggaaggcagatggtgccctgctgcccatcggggtggtgaagtctgtcaaacaggagatgaatggtacatacgtgtgccatgcctttagctcccatgggaatgtcaccaggaatgtgtacctgacagtactgtaccactctcaaaataactggactataatcattctggtgccagtactgctggtcattgtgggcctcgtgatggcagcctcttatgtttataaccgccagagaaagatcaggatatacaagttacagaaggctcaggaggaggccataaaactcaagggacaagccccacctccctga

SEQ ID NO: 15 - DNA, 1493 bp, Homo sapiens
atgacagttttcctttcctttgctttcctcgctgccattctgactcacatagggtgcagcaatcagcgccgaagtccagaaaacagtgggagaagatataaccggattcaacatgggcaatgtgcctacactttcattcttccagaacacgatggcaactgtcgtgagagtacgacagaccagtacaacacaaacgctctgcagagagatgctccacacgtggaaccggatttctcttcccagaaacttcaacatctggaacatgtgatggaaaattatactcagtggctgcaaaaacttgagaattacattgtggaaaacatgaagtcggagatggcccagatacagcagaatgcagttcagaaccacacggctaccatgctggagataggaaccagcctcctctctcagactgcagagcagaccagaaagctgacagatgttgagacccaggtactaaatcaaacttctcgacttgagatacagctgctggagaattcattatccacctacaagctagagaagcaacttcttcaacagacaaatgaaatcttgaagatccatgaaaaaaacagtttattagaacataaaatcttagaaatggaaggaaaacacaaggaagagttggacaccttaaaggaagagaaagagaaccttcaaggcttggttactcgtcaaacatatataatccaggagctggaaaagcaattaaacagagctaccaccaacaacagtgtccttcagaagcagcaactggagctgatggacacagtccacaaccttgtcaatctttgcactaagaagttttactaaagggaggaaaaagagaggaagagaaaccatttagagactgtgcagatgtatatcaagctggttttaataaaagtggaatctacactatttatattaataatatgccagaacccaaaaaggtgttttgcaatatggatgtcaatgggggaggttggactgtaatacaacatcgtgaagatggaagtctagatttccaaagaggctggaaggaatataaaatgggttttggaaatccctccggtgaatattggctggggaatgagtttatttttgccattaccagtcagaggcagtacatgctaagaattgagttaatggactgggaagggaaccgagcctattcacagtatgacagattccacataggaaatgaaaagcaaaactataggttgtatttaaaaggtcacactgggacagcaggaaaacagagcagcctgatcttacacggtgctgatttcagcactaaagatgctgataatgacaactgtatgtgcaaatgtgccctcatgttaacaggaggatggtggtttgatgcttgtggcccctccaatctaaatggaatgttctatactgcgggacaaaaccatggaaaactgaatgggataaagtggcactacttcaaagggcccagttactccttacgttccacaactatgatgattcgacctttagatttttga

SEQ ID NO: 16 - DNA, 1497 bp, Homo sapiens
atgacagttttcctttcctttgctttcctcgctgccattctgactcacatagggtgcagcaatcagcgccgaagtccagaaaacagtgggagaagatataaccggattcaacatgggcaatgtgcctacactttcattcttccagaacacgatggcaactgtcgtgagagtacgacagaccagtacaacacaaacgctctgcagagagatgctccacacgtggaaccggatttctcttcccagaaacttcaacatctggaacatgtgatggaaaattatactcagtggctgcaaaaacttgagaattacattgtggaaaacatgaagtcggagatggcccagatacagcagaatgcagttcagaaccacacggctaccatgctggagataggaaccagcctcctctctcagactgcagagcagaccagaaagctgacagatgttgagacccaggtactaaatcaaacttctcgacttgagatacagctgctggagaattcattatccacctacaagctagagaagcaacttcttcaacagacaaatgaaatcttgaagatccatgaaaaaaacagtttattagaacataaaatcttagaaatggaaggaaaacacaaggaagagttggacaccttaaaggaagagaaagagaaccttcaaggcttggttactcgtcaaacatatataatccaggagctggaaaagcaattaaacagagctaccaccaacaacagtgtccttcagaagcagcaactggagctgatggacacagtccacaaccttgtcaatctttgcactaaagaaggtgttttactaaagggaggaaaaagagaggaagagaaaccatttagagactgtgcagatgtatatcaagctggttttaataaaagtggaatctacactatttatattaataatatgccagaacccaaaaaggtgttttgcaatatggatgtcaatgggggaggttggactgtaatacaacatcgtgaagatggaagtctagatttccaaagaggctggaaggaatataaaatgggttttggaaatccctccggtgaatattggctggggaatgagtttatttttgccattaccagtcagaggcagtacatgctaagaattgagttaatggactgggaagggaaccgagcctattcacagtatgacagattccacataggaaatgaaaagcaaaactataggttgtatttaaaaggtcacactgggacagcaggaaaacagagcagcctgatcttacacggtgctgatttcagcactaaagatgctgataatgacaactgtatgtgcaaatgtgccctcatgttaacaggaggatggtggtttgatgcttgtggcccctccaatctaaatggaatgttctatactgcgggacaaaaccatggaaaactgaatgggataaagtggcactacttcaaagggcccagttactccttacgttccacaactatgatgattcgacctttagatttttga

SEQ ID NO: 17 - DNA, 159 bp, Canis familiaris
aggaggaagtctagattttccaagaggttggaaagaatataaaatgggttttggaaatccctctggtgaatattggctggggaatgagtttatttttgccattaccagtcagaggcagtacacactaagaattgagttaatggactgggaaggaaaccc

SEQ ID NO: 18 - DNA, 2269 bp, Homo sapiens
tgggttggtgtttatctcctcccagccttgagggagggaacaacactgtaggatctggggagagaggaacaaaggaccgtgaaagctgctctgtaaaagctgacacagccctcccaagtgagcaggactgttcttcccactgcaatctgacagtttactgcatgcctggagagaacacagcagtaaaaaccaggtttgctactggaaaaagaggaaagagaagactttcattgacggacccagccatggcagcgtagcagccctgcgtttcagacggcagcagctcgggactctggacgtgtgtttgccctcaagtttgctaagctgctggtttattactgaagaaagaatgtggcagattgttttctttactctgagctgtgatcttgtcttggccgcagcctataacaactttcggaagagcatggacagcataggaaagaagcaatatcaggtccagcatgggtcctgcagctacactttcctcctgccagagatggacaactgccgctcttcctccagcccctacgtgtccaatgctgtgcagagggacgcgccgctcgaatacgatgactcggtgcagaggctgcaagtgctggagaacatcatggaaaacaacactcagtggctaatgaagcttgagaattatatccaggacaacatgaagaaagaaatggtagagatacagcagaatgcagtacagaaccagacggctgtgatgatagaaatagggacaaacctgttgaaccaaacagctgagcaaacgcggaagttaactgatgtggaagcccaagtattaaatcagaccacgagacttgaacttcagctcttggaacactccctctcgacaaacaaattggaaaaacagattttggaccagaccagtgaaataaacaaattgcaagataagaacagtttcctagaaaagaaggtgctagctatggaagacaagcacatcatccaactacagtcaataaaagaagagaaagatcagctacaggtgttagtatccaagcaaaattccatcattgaagaactagaaaaaaaaatagtgactgccacggtgaataattcagttcttcaaaagcagcaacatgatctcatggagacagttaataacttactgactatgatgtccacatcaaactcagctaaggaccccactgttgctaaagaagaacaaatcagcttcagagactgtgctgaagtattcaaatcaggacacaccacaaatggcatctacacgttaacattccctaattctacagaagagatcaaggcctactgtgacatggaagctggaggaggcgggtggacaattattcagcgacgtgaggatggcagcgttgattttcagaggacttggaaagaatataaagtgggatttggtaacccttcaggagaatattggctgggaaatgagtttgtttcgcaactgactaatcagcaacgctatgtgcttaaaatacaccttaaagactgggaagggaatgaggcttactcattgtatgaacatttctatctctcaagtgaagaactcaattataggattcaccttaaaggacttacagggacagccggcaaaataagcagcatcagccaaccaggaaatgattttagcacaaaggatggagacaacgacaaatgtatttgcaaatgttcacaaatgctaacaggaggctggtggtttgatgcatgtggtccttccaacttgaacggaatgtactatccacagaggcagaacacaaataagttcaacggcattaaatggtactactggaaaggctcaggctattcgctcaaggccacaaccatgatgatccgaccagcagatttctaaacatcccagtccacctgaggaactgtctcgaactattttcaaagacttaagcccagtgcactgaaagtcacggctgcgcactgtgtcctcttccaccacagagggcgtgtgctcggtgctgacgggacccacatgctccagattagagcctgtaaactttatcacttaaacttgcatcacttaacggaccaaagcaagaccctaaacatccataattgtgattagacagaacacctatgcaaagatgaacccgaggctgagaatcagactgacagtttacagacgctgctgtcacaaccaagaatgttatgtgcaagtttatcagtaaataactggaaaacagaacacttatgttatacaatacagatcatcttggaactgcattcttctgagcactgtttatacactgtgtaaatacccatatgtcct

SEQ ID NO: 19 - DNA, 1376 bp, Homo sapiens
ggtttattactgaagaaagaatgtggcagattgttttctttactctgagctgtgatcttgtcttggccgcagcctataacaactttcggaagagcatggacagcataggaaagaagcaatatcaggtccagcatgggtcctgcagctacactttcctcctgccagagatggacaactgccgctcttcctccagcccctacgtgtccaatgctgtgcagagggacgcgccgctcgaatacgatgactcggtgcagaggctgcaagtgctggagaacatcatggaaaacaacactcagtggctaatgaaggtattaaatcagaccacgagacttgaacttcagctcttggaacactccctctcgacaaacaaattggaaaaacagattttggaccagaccagtgaaataaacaaattgcaagataagaacagtttcctagaaaagaaggtgctagctatggaagacaagcacatcatccaactacagtcaataaaagaagagaaagatcagctacaggtgttagtatccaagcaaaattccatcattgaagaactagaaaaaaaaatagtgactgccacggtgaataattcagttcttcaaaagcagcaacatgatctcatggagacagttaataacttactgactatgatgtccacatcaaactcagctaaggaccccactgttgctaaagaagaacaaatcagcttcagagactgtgctgaagtattcaaatcaggacacaccacaaatggcatctacacgttaacattccctaattctacagaagagatcaaggcctactgtgacatggaagctggaggaggcgggtggacaattattcagcgacgtgaggatggcagcgttgattttcagaggacttggaaagaatataaagtgggatttggtaacccttcaggagaatattggctgggaaatgagtttgtttcgcaactgactaatcagcaacgctatgtgcttaaaatacaccttaaagactgggaagggaatgaggcttactcattgtatgaacatttctatctctcaagtgaagaactcaattataggattcaccttaaaggacttacagggacagccggcaaaataagcagcatcagccaaccaggaaatgattttagcacaaaggatggagacaacgacaaatgtatttgcaaatgttcacaaatgctaacaggaggctggtggtttgatgcatgtggtccttccaacttgaacggaatgtactatccacagaggcagaacacaaataagttcaacggcattaaatggtactactggaaaggctcaggctattcgctcaaggccacaaccatgatgatccgaccagcagatttctaaacatcccagtccacctgagga

SEQ ID NO: 20 - DNA, 2424 bp, Mus musculus
  misc_feature (2308)..(2308): n is a, c, g, or t
ggctgctccttcctctcaggacagctccgagtgtgccggggagaagagaagagaagagacaggcactgggaaagagcctgctgcgggacggagaaggctctcactgatggacttattcacacggcacagccctgtgccttagacagcagctgagagctcaggacgcaagtttgctgaactcacagtttagaacccaaaaagagagagagaatgtggcagatcattttcctaacttttggctgggatcttgtcttggcctcagcctacagtaactttaggaagagcgtggacagcacaggcagaaggcagtaccaggtccagaacggaccctgcagctacacgttcctgctgccggagaccgacagctgccgatcttcctccagcccctacatgtccaatgccgtgcagagggatgcacccctcgactacgacgactcagtgcaaaggctgcaggtgctggagaacattctagagaacaacacacagtggctgatgaagctggagaattacattcaggacaacatgaagaaggagatggtggagatccaacagaatgtggtgcagaaccagacagctgtgatgatagagattggaaccagcttgctgaaccagacagcagcacaaactcggaaactgactgatgtggaagcccaagtactaaaccagacgacaagactcgagctgcagcttctccaacattctatttctaccaacaaattggaaaagcagattttggatcagaccagtgaaataaacaagctacaaaataagaacagcttcctagaacagaaagttctggacatggagggcaagcacagcgagcagctacagtccatgaaggagcagaaggacgagctccaggtgctggtgtccaagcagagctctgtcattgacgagctggagaagaagctggtgacagccacggtcaacaactcgctccttcagaagcagcagcatgacctaatggagaccgtcaacagcttgctgaccatgatgtcatcacccaactccaagagctcggttgctatccgtaaagaagagcaaaccaccttcagagactgtgcggaaatcttcaagtcaggactcaccaccagtggcatctacacactgaccttccccaactccacagaggagatcaaggcctactgtgacatggacgtgggtggaggagggtggacagtcatccaacaccgagaagatggcagtgtggacttccagaggacgtggaaagaatacaaagagggcttcgggaaccctctgggagagtactggctgggcaatgagtttgtctcccagctgaccggtcagcaccgctacgtgcttaagatccagctgaaggactgggaaggcaacgaggcgcattcgctgtatgatcacttctacctcgctggtgaagagtccaactacaggattcaccttacaggactcacggggaccgcggccaaaataagtagcatcagccaaccaggaagtgattttagcacaaaggattcggacaatgacaaatgcatctgcaagtgttcccagatgctctcaggaggctggtggtttgacgcatgtggtccttccaacttgaatggacagtactacccacaaaaacagaatacaaataagtttaacggtatcaagtggtactactggaaggggtccggctactcgctcaaggccacaaccatgatgatccggccagcagatttctaaatgcctgcctacactaccagaagaacttgctgcatccaaagattaactccaaggcactgagagacaccagtgcatagcagcccctttccacatcaggaagtgctcctgggggtggggagggtctgtgtgtaccagactgaagcgcatcacttaagcctgcaccgctaaccaaccaaaggcactgcagtctggagaaacacttctgggaaggttgtggctgaggatcagaaggacagcgtgcagactctgtcacaaggaagaatgttccgtgggagttcagcagtaaataactggaaaacagaacacttagatggtgcagataaatcttgggaccacattcctctaagcacggtttctagagtgaatacattcacagctcggctgtcacaatgacaaggccgtgtcctcgcactgtggcagccagtatccagggacttctaagtggtgggcacaggctatcatctggagaagcacacattcattgttttcctcttgggtgcttaacatgttcatttgaaaacaacacatttacctatcttgatggcttagtttttaatggctggctactatttactatatggcaaaaatgcccacatctctggaatanccaccaaataagcgccatgttggtgaatgcggaggctgtactattttgttttcttcctggctggtaaatatgaaggtatttttagtaattaaatataagttattagttgaaagacc

SEQ ID NO: 21 - DNA, 4138 bp, Homo sapiens
cttctgtgctgttccttcttgcctctaacttgtaaacaagacgtactaggacgatgctaatggaaagtcacaaaccgctgggtttttgaaaggatccttgggacctcatgcacatttgtggaaactggatggagagatttggggaagcatggactctttagccagcttagttctctgtggagtcagcttgctcctttctggaactgtggaaggtgccatggacttgatcttgatcaattccctacctcttgtatctgatgctgaaacatctctcacctgcattgcctctgggtggcgcccccatgagcccatcaccataggaagggactttgaagccttaatgaaccagcaccaggatccgctggaagttactcaagatgtgaccagagaatgggctaaaaaagttgtttggaagagagaaaaggctagtaagatcaatggtgcttatttctgtgaagggcgagttcgaggagaggcaatcaggatacgaaccatgaagatgcgtcaacaagcttccttcctaccagctactttaactatgactgtggacaagggagataacgtgaacatatctttcaaaaaggtattgattaaagaagaagatgcagtgatttacaaaaatggttccttcatccattcagtgccccggcatgaagtacctgatattctagaagtacacctgcctcatgctcagccccaggatgctggagtgtactcggccaggtatataggaggaaacctcttcacctcggccttcaccaggctgatagtccggagatgtgaagcccagaagtggggacctgaatgcaaccatctctgtactgcttgtatgaacaatggtgtctgccatgaagatactggagaatgcatttgccctcctgggtttatgggaaggacgtgtgagaaggcttgtgaactgcacacgtttggcagaacttgtaaagaaaggtgcagtggacaagagggatgcaagtcttatgtgttctgtctccctgacccctatgggtgttcctgtgccacaggctggaagggtctgcagtgcaatgaagcatgccaccctggtttttacgggccagattgtaagcttaggtgcagctgcaacaatggggagatgtgtgatcgcttccaaggatgtctctgctctccaggatggcaggggctccagtgtgagagagaaggcataccgaggatgaccccaaagatagtggatttgccagatcatatagaagtaaacagtggtaaatttaatcccatttgcaaagcttctggctggccgctacctactaatgaagaaatgaccctggtgaagccggatgggacagtgctccatccaaaagactttaaccatacggatcatttctcagtagccatattcaccatccaccggatcctcccccctgactcaggagtttgggtctgcagtgtgaacacagtggctgggatggtggaaaagcccttcaacatttctgttaaagttcttccaaagcccctgaatgccccaaacgtgattgacactggacataactttgctgtcatcaacatcagctctgagccttactttggggatggaccaatcaaatccaagaagcttctatacaaacccgttaatcactatgaggcttggcaacatattcaagtgacaaatgagattgttacactcaactatttggaacctcggacagaatatgaactctgtgtgcaactggtccgtcgtggagagggtggggaagggcatcctggacctgtgagacgcttcacaacagcttctatcggactccctcctccaagaggtctaaatctcctgcctaaaagtcagaccactctaaatttgacctggcaaccaatatttccaagctcggaagatgacttttatgttgaagtggagagaaggtctgtgcaaaaaagtgatcagcagaatattaaagttccaggcaacttgacttcggtgctacttaacaacttacatcccagggagcagtacgtggtccgagctagagtcaacaccaaggcccagggggaatggagtgaagatctcactgcttggacccttagtgacattcttcctcctcaaccagaaaacatcaagatttccaacattacacactcctcggctgtgatttcttggacaatattggatggctattctatttcttctattactatccgttacaaggttcaaggcaagaatgaagaccagcacgttgatgtgaagataaagaatgccaccatcattcagtatcagctcaagggcctagagcctgaaacagcataccaggtggacatttttgcagagaacaacatagggtcaagcaacccagccttttctcatgaactggtgaccctcccagaatctcaagcaccagcggacctcggaggggggaagatgctgcttatagccatccttggctctgctggaatgacctgcctgactgtgctgttggcctttctgatcatattgcaattgaagagggcaaatgtgcaaaggagaatggcccaagccttccaaaacgtgagggaagaaccagctgtgcagttcaactcagggactctggccctaaacaggaaggtcaaaaacaacccagatcctacaatttatccagtgcttgactggaatgacatcaaatttcaagatgtgattggggagggcaattttggccaagttcttaaggcgcgcatcaagaaggatgggttacggatggatgctgccatcaaaagaatgaaagaatatgcctccaaagatgatcacagggactttgcaggagaactggaagttctttgtaaacttggacaccatccaaacatcatcaatctcttaggagcatgtgaacatcgaggctacttgtacctggccattgagtacgcgccccatggaaaccttctggacttccttcgcaagagccgtgtgctggagacggacccagcatttgccattgccaatagcaccgcgtccacactgtcctcccagcagctccttcacttcgctgccgacgtggcccggggcatggactacttgagccaaaaacagtttatccacagggatctggctgccagaaacattttagttggtgaaaactatgtggcaaaaatagcagattttggattgtcccgaggtcaagaggtgtacgtgaaaaagacaatgggaaggctcccagtgcgctggatggccatcgagtcactgaattacagtgtgtacacaaccaacagtgatgtatggtcctatggtgtgttactatgggagattgttagcttaggaggcacaccctactgcgggatgacttgtgcagaactctacgagaagctgccccagggctacagactggagaagcccctgaactgtgatgatgaggtgtatgatctaatgagacaatgctggcgggagaagccttatgagaggccatcatttgcccagatattggtgtccttaaacagaatgttagaggagcgaaagacctacgtgaataccacgctttatgagaagtttacttatgcaggaattgactgttctgctgaagaagcggcctaggacagaacatctgtataccctctgtttccctttcactggcatgggagacccttgacaactgctgagaaaacatgcctctgccaaaggatgtgatatataagtgtacatatgtgctggaattctaacaagtcataggttaatatttaagacactgaaaaatctaagtgatataaatcagattcttctctctcattttatccctcacctgtagcatgccagtcccgtttcatttagtcatgtgaccactctgtcttgtgtttccacagcctgcaagttcagtccaggatgctaacatctaaaaatagacttaaatctcattgcttacaagcctaagaatctttagagaagtatacataagtttaggataaaataatgggattttcttttcttttctctggtaatattgacttgtatattttaagaaataacagaaagcctgggtgacatttgggagacatgtgacatttatatattgaattaatatccctacatgtattgcacattgtaaaaagttttagttttgatgagttgtgagtttaccttgtatactgtaggcacactttgcactgatatatcatgagtgaataaatgtcttgcctactcaaaaaaaaaaaa

SEQ ID NO: 22 - DNA, 2578 bp, Homo sapiens
acatttgtggaaactggatggagagatttggggaagcatggactctttagccagcttggttctctgtggagtcagcttgctcctttctggaactgtggaaggtgccatggactctttagccagcttagttctctgtggagtcagcttgctcctttctggaactgtggaaggtgccatggacttgatcttgatcaattccctacctcttgtatctgatgctgaaacatctctcacctgcattgcctctgggtggcgcccccatgagcccatcaccataggaagggactttgaagccttaatgaaccagcaccaggatccgctggaagttactcaagatgtgaccagagaatgggctaaaaaagttgtttggaagagagaaaaggctagtaagatcaatggtgcttatttctgtgaagggcgagttcgaggagaggcaatcaggatacgaaccatgaagatgcgtcaacaagcttccttcctaccagctactttaactatgactgtggacaagggagataacgtgaacatatctttcaaaaaggtattgattaaagaagaagatgcagtgatttacaaaaatggttccttcatccattcagtgccccggcatgaagtacctgatattctagaagtacacctgcctcatgctcagccccaggatgctggagtgtactcggccaggtatataggaggaaacctcttcacctcggccttcaccaggctgatagtccggagatgtgaagcccagaagtggggacctgaatgcaaccatctctgtactgcttgtatgaacaatggtgtctgccatgaagatactggagaatgcatttgccctcctgggtttatgggaaggacgtgtgagaaggcttgtgaactgcacacgtttggcagaacttgtaaagaaaggtgcagtggacaagagggatgcaagtcttatgtgttctgtctccctgacccctatgggtgttcctgtgccacaggctggaagggtctgcagtgcaatgaaggcataccgaggatgaccccaaagatagtggatttgccagatcatatagaagtaaacagtggtaaatttaatcccatttgcaaagcttctggctggccgctacctactaatgaagaaatgaccctggtgaagccggatgggacagtgctccatccaaaagactttaaccatacggatcatttctcagtagccatattcaccatccaccggatcctcccccctgactcaggagtttgggtctgcagtgtgaacacagtggctgggatggtggaaaagcccttcaacatttctgttaaagttcttccaaagcccctgaatgccccaaacgtgattgacactggacataactttgctgtcatcaacatcagctctgagccttactttggggatggaccaatcaaatccaagaagcttctatacaaacccgttaatcactatgaggcttggcaacatattcaagtgacaaatgagattgttacactcaactatttggaacctcggacagaatatgaactctgtgtgcaactggtccgtcgtggagagggtggggaagggcatcctggacctgtgagacgcttcacaacagcttctatcggactccctcctccaagaggtctaaatctcctgcctaaaagtcagaccactctaaatttgacctggcaaccaatatttccaagctcggaagatgacttttatgttgaagtggagagaaggtctgtgcaaaaaagtgatcagcagaatattaaagttccaggcaacttgacttcggtgctacttaacaacttacatcccagggagcagtacgtggtccgagctagagtcaacaccaaggcccagggggaatggagtgaagatctcactgcttggacccttagtgacattcttcctcctcaaccagaaaacatcaagatttccaacattacacactcctcggctgtgatttcttggacaatattggatggctattctatttcttctattactatccgttacaaggttcaaggcaagaatgaagaccagcacgttgatgtgaagataaagaatgccaccatcattcagtatcagctcaagggcctagagcctgaaacagcataccaggtggacatttttgcagagaacaacatagggtcaagcaacccagccttttctcatgaactggtgaccctcccagaatctcaagcaccagcggacctcggaggggggaagatgctgcttatagccatccttggctctgctggaatgacctgcctgactgtgctgttggcctttctgatcatattgcaattgaagagggcaaatgtgcaaaggagaatggcccaagccttccaaaacgtgagggaagaaccagctgtgcagttcaactcagggactctggccctaaacaggaaggtcaaaaacaacccagatcctacaatttatccagtgcttgactggaatgacatcaaatttcaagatgtgattggggagggcaattttggccaagttcttaaggcgcgcatcaagaaggatgggttacggatggatgctgccatcaaaagaatgaaagaatatgcctccaaagatgatcacagg

SEQ ID NO: 23 - DNA, 984 bp, Homo sapiens
atgaagaaacatcatcatcatcatcatggcaaaaacaacccagatcctacaatttatccagtgcttgactggaatgacatcaaatttcaagatgtgattggggagggcaattttggccaagttcttaaggcgcgcatcaagaaggatgggttacggatggatgctgccatcaaaagaatgaaagaatatgcctccaaagatgatcacagggactttgcaggagaactggaagttctttgtaaacttggacaccatccaaacatcatcaatctcttaggagcatgtgaacatcgaggcttcttgtacctggccattgagtacgcgccccatggaaaccttctggacttccttcgcaagagccgtgtgctggagacggacccagcatttgccattgccaatagcaccgcgtccacactgtcctcccagcagctccttcacttcgctgccgacgtggcccggggcatggactacttgagccaaaaacagtttatccacagggatctggctgccagaaacattttagttggtgaaaactatgtggcaaaaatagcagattttggattgtcccgaggtcaagaggtgtatgtgaaaaagacaatgggaaggctcccagtgcgctggatggccatcgagtcactgaattacagtgtgtacacaaccaacagtgatgtatggtcctatggtgtgttactatgggagattgttagcttaggaggcacaccctactgcggaatgacttgtgcagaactcttcgagaagctgccccagggctacagactggagaagcccctgaactgtgatgatgaggtgtatgatctaatgagacaatgctggcgggagaagccttatgagaggccatcatttgcccagatattggtgtccttaaacagaatgttagaggagcgaaagacctacgtgaataccacgctttatgagaagtttacttatgcaggaattgactgtgctgctgaagaagcggcctag

SEQ ID NO: 24 - DNA, 4676 bp, Mus musculus
ccacgcgtccgagcaggagccggagcaggagcagaagataagccttggatgaagggcaagatggatagggctcgctctgccccaagccctgctgataccaagtgcctttaagatacagcctttcccatcctaatctgcaaaggaaacaggaaaaaggaacttaaccctccctgtgctcagacagaaatgagactgttaccgcctgcttctgtggtgtttctccttgccgccaacttgtaaacaagagcgagtggaccatgcgagcgggaagtcgcaaagttgtgagttgttgaaagcttcccagggactcatgctcatctgtggacgctggatggggagatctggggaagtatggactctttagccggcttagttctctgtggagtcagcttgctcctttatggagtagtagaaggtgccatggacctgatcttgatcaattccctacctcttgtgtctgatgccgaaacatccctcacctgcattgcctctgggtggcacccccatgagcccatcaccataggaagggactttgaagccttaatgaaccagcaccaagatccactggaggttactcaagatgtgaccagagaatgggcgaaaaaagttgtttggaagagagaaaaggccagtaagattaatggtgcttatttctgtgaaggtcgagttcgaggacaggctataaggatacggaccatgaagatgcgtcaacaagcgtccttcctacctgctactttaactatgaccgtggacaggggagataatgtgaacatatctttcaaaaaggtgttaattaaagaagaagatgcagtgatttacaaaaatggctcccttcatccactcagtgcccccggcatgaagtaccttgatattttagaagttcacttgccgcatgctcagccccaggatgctggtgtgtactcggccaggtacataggaggaaacctgttcacctcagccttcaccaggctgattgttcggagatgtgaagctcagaagtgggggcccgactgtagccgtccttgtactacttgcaagaacaatggagtctgccatgaagataccggggaatgcatttgccctcctgggtttatggggagaacatgtgagaaagcttgtgagccgcacacatttggcaggacctgtaaagaaaggtgtagtggaccagaaggatgcaagtcttatgtgttctgtctcccagacccttacgggtgttcctgtgccacaggctggagggggttgcagtgcaatgaagcatgcccatctggttactacggaccagactgtaagctcaggtgccactgtaccaatgaagagatatgtgatcggttccaaggatgcctctgctctcaaggatggcaagggctgcagtgtgagaaagaaggcaggccaaggatgactccacagatagaggatttgccagatcacattgaagtaaacagtggaaaatttaaccccatctgcaaagcctctgggtggccactacctactagtgaagaaatgaccctagtgaagccagatgggacagtgctccaaccaaatgacttcaactatacagatcgtttctcagtggccatattcactgtcaaccgagtcttacctcctgactcaggagtctgggtctgcagtgtgaacacagtggctgggatggtggaaaagcctttcaacatttccgtcaaagttcttccagagcccctgcacgccccaaatgtgattgacactggacataactttgctatcatcaatatcagctctgagccttactttggggatggacccatcaaatccaagaagcttttctataaacctgtcaatcaggcctggaaatacattgaagtgacgaatgagattttcactctcaactacttggagccgcggactgactacgagctgtgtgtgcagctggcccgtcctggagagggtggagaagggcatcctgggcctgtgagacgatttacaacagcgtctatcggactccctcctccaagaggtctcagtctcctgccaaaaagccagacagctctaaatttgacttggcaaccgatatttacaaactcagaagatgaattttatgtggaagtcgagaggcgatccctgcaaacaacaagtgatcagcagaacatcaaagtgcctgggaacctgacctcggtgctactgagcaacttagtccccagggagcagtacacagtccgagctagagtcaacaccaaggcgcagggggagtggagtgaagaactcagggcctggacccttagtgacattctccctcctcaaccagaaaacatcaagatctccaacatcactgactccacagctatggtttcttggacaatagtggatggctattcgatttcttccatcatcatccggtataaggttcagggcaaaaatgaagaccagcacattgatgtgaagatcaagaatgctaccgttactcagtaccagctcaagggcctagagccagagactacataccatgtggatatttttgctgagaacaacataggatcaagcaacccagccttttctcatgaactgaggacgcttccacattccccagcctctgcagacctcggaggggggaaagatgctactcatagccatccttgggtcggctggaatgactttgcatcaccgtgcttgttggcgtttctgattatgttgcaactgaagagagcaaatgtccaaaggagaatggctcaggcattccagaacgtgagagaagaaccagctgtgcagtttaactcaggaactctggcccttaacaggaaggccaaaaacaatccggatcccacaatttatcctgtgcttgactggaatgacatcaagtttcaagacgtgatcggagagggcaactttggccaggttctgaaggcacgcatcaagaaggatgggttacggatggatgccgccatcaagaggatgaaagagtatgcctccaaagatgatcacagggacttcgcaggagaactggaggttctttgtaaacttggacaccatccaaacatcatcaatctcttgggagcatgtgaacaccgaggctatttgtacctagctattgagtatgccccgcatggaaacctcctggacttcctgggtaagagcagagtgctagagacagaccctgctttttgccatcgccaacagtacagttccacactgtcctcccaacagcttcttcattttgctgcagatgtggcccgggggatggactacttgagccagaaacagtttatccacagggacctggctgccagaaacattttagttggtgaaaactacatagccaaaatagcagattttggattgtcacgaggtcaagaagtgtatgtgaaaaagacaatgggaaggctcccagtgcgttggatggcaatcgaatcactgaactatagtgtctatacaaccaacagtgatgtctggtcctatggtgtattgctctgggagattgttagcttaggaggcaccccctactgcggcatgacgtgcgcggagctctatgagaagctaccccagggctacaggctggagaagcccctgaactgtgatgatgaggtgtatgatctaatgagacagtgctggagggagaagccttatgagagaccatcatttgcccagatattggtgtccttaaacaggatgctggaagaacggaagacatacgtgaacaccacactgtatgagaagtttacctatgcaggaattgactgccctgcggaagaagcagcctagagcagaactcttcatgtacaacggccatttctcctcactggcgcgagacctttgtacacctgtaccaagcaagccacccactgccaagagatgtgatatataagtttatatattgtgctgtgtttgggaccctcctcatacagttcgtgcggatctgcagtgtgttctgactctaatgtgactgtatatactgctcggagtaagaatgtgctaagatcagaatgcctgtccgtggtttcatctaatatattttcctaaaagcatagattgcacaggaaggtatgagtacaaatactgtaatgcataacttgttattgtcctagatgtgtttgatattttcgctttacaactgaatgctataaaagtgttttgctgtgtacacataagatactgttcgttaaaataagcattcccttgacagcacaggaagaaaagcgagggaaatgtatggattatattaaatgtgggttactacacaagaggccgaacattccaagtagcagaagagagggtctctcaactctgctcctcacctgcagaagccagtttgtttggccatgtgacaattgtcctgtgtttttatagcacccaaatcattctaaaatatgaacatctaaaaactttgctaggagactaagaacctttggagagatagatataagtacggtcaaaaaacaaaactgcgggacttacatttattttctatagtaatctgttgtacattttaaggaggtaaactaggatttaggagtgatgtgtgacatttctgccatggagttaccatccccacatgtatcacatactgcatattcccacatgtatcacacatgtattgtaaaattttgtagttttgatcacttgtgaatttactgttgatgtggtagccacctgctgcaatggttcctcttgtaggtgaataaatgtcttgtctacccacaaaaaaaaaa

SEQ ID NO: 25 - DNA, 2135 bp, Rattus norvegicus
agcccctgcatgccccaaatgttattgacactggacacaactttgctatcatcaacatcagctctgagccttactttggggatggaccgatcaaatccaagaagctcttctataaacctgtcaatcaggcttggaaatacattcaagtgatgaatgagattgtcacactcaactacctggagcctcggactgactacgagctgtgtgtacagctggtccgtcctggagagggtggagaaggacatcctggacctgtgagaagattcacaacagcgtctatcggactccctcctccaagaggtctcagtctcctacccaaaagccagacagctctgaatttgacttggcaaccgatatttacaagctcagaagatgaattttatgtggaagttgagaggtggtcccagcaaacaagaagtgatcagcagaacatcaaagtgcctgggaacctgacttccgtgctgctgaacaacttactccccagggagcagtacagcgtccgagctagagtcaacaccaaggcccagggggagtggagtgaagaactcagggcctggacccttagtgacaaaaacatcaagatcaccaacatcactgattacacagctctggtttcttggacaatcgtggacggctattcgatttcttccatcatcatccggtataaggttcagggcaaaaatgaagaccagcacattgacgtgaagatcaagaatgccaccatcactcaataccagctcaagggcctagagccagagactacataccatgtggatatttttgctgagaacaacataggatcaagcaacccagccttttcccaagaaattaggacacttccagcccctaaagaccttggagggggaaagatgctacttatagccattcttgggtcggctggaatgacttgcatcaccgtgctattggcgtttctgattatgttgcaactgaagagagcaaatgtccaaagaagaatggcccaggccttccagaacgtgagagaagaaccagctgttcagttcaactcaggaactctggccctaaacaggaaggccaaaaacaatccggatcccacaatttatcctgtgcttgactggaatgacatcaagttccaagatgtgattggagagggcaactttggccaggttctgaaggcgcgcatcaagaaggatgggttacggatggacgctgccatcaagaggatgaaaggtttggaggacagcatttgctggggtggggagacaccgcttcctgttgaaatcttccgtttgtggccatatattcttcaaaccagatgtgaagaagcaacattacaactcttggcctttcttccagaatatgcctccaaagatgatcacagggactttgcaggagaactggaggttctttgtaaacttggacaccatccgaacatcattaatctcttgggagcatgtgaacacagaggctacttatacctggctattgagtatgccccacatggaaacctcctggactttctgcgtaagagccgagtgctagagacagaccctgcctttgccatcgccaacagcacggcttccacactgtcctcccagcagcttcttcattttgctgcagatgtggcccgggggatggactacttgagccaaaaacagtttatccacagggacctggctgccagaaacattttagttggcgaaaactacatagccaaaatagcagattttggattgtcacgaggtcaagaagtgtatgtgaaaaagacaatgggaaggctcccagtgcgctggatggcaattgagtctctgaactatagtgtctatacaaccaacagtgatgtatggtcctatggtgtattgctctgggagatcgttagcttaggaggcactccatactgcggcatgacatgtgcagaactctatgagaagctgccccagggctacagattggagaagcccctgaactgtgatgatgaggtgtatgatctaatgagacaatgctggagggagaagccttatgagagaccatcatttgcccagatattggtgtccttaaacagaatgctggaagaacgaaagacatacgtgaacaccacactttatgagaagtttacctacgcaggaattgactgttctgctgaagaagcagcctag

SEQ ID NO: 26 - DNA, 1553 bp, Homo sapiens
  CDS (27)..(1514)
ctgagatcaccggtaggagggccaacatgtggcagattgttttctttactctgagctgtgatcttgtcttggccgcagcctataacaactttcggaagagcatggacagcataggaaagaagcaatatcaggtccagcatgggtcctgcagctacactttcctcctgccagagatggacaactgccgctcttcctccagcccctacgtgtccaatgctgtgcagagggacgcgccgctcgaatacgatgactcggtgcagaggctgcaagtgctggagaacatcatggaaaacaacactcagtggctaatgaagcttgagaattatatccaggacaacatgaagaaagaaatggtagagatacagcagaatgcagtacagaaccagacggctgtgatgatagaaatagggacaaacctgttgaaccaaacagctgagcaaacgcggaagttaactgatgtggaagcccaagtattaaatcagaccacgagacttgaacttcagctcttggaacactccctctcgacaaacaaattggaaaaacagattttggaccagaccagtgaaataaacaaattgcaagataagaacagtttcctagaaaagaaggtgctagctatggaagacaagcacatcatccaactacagtcaataaaagaagagaaagatcagctacaggtgttagtatccaagcaaaattccatcattgaagaactagaaaaaaaaatagtgactgccacggtgaataattcagttcttcaaaagcagcaacatgatctcatggagacagttaataacttactgactatgatgtccacatcaaactcagctaaggaccccactgttgctaaagaagaacaaatcagcttcagagactgtgctgaagtattcaaatcaggacacaccacaaatggcatctacacgttaacattccctaattctacagaagagatcaaggcctactgtgacatggaagctggaggaggcgggtggacaattattcagcgacgtgaggatggcagcgttgattttcagaggacttggaaagaatataaagtgggatttggtaacccttcaggagaatattggctgggaaatgagtttgtttcgcaactgactaatcagcaacgctatgtgcttaaaatacaccttaaagactgggaagggaatgaggcttactcattgtatgaacatttctatctctcaagtgaagaactcaattataggattcaccttaaaggacttacagggacagccggcaaaataagcagcatcagccaaccaggaaatgattttagcacaaaggatggagacaacgacaaatgtatttgcaaatgttcacaaatgctaacaggaggctggtggtttgatgcatgtggtccttccaacttgaacggaatgtactatccacagaggcagaacacaaataagttcaacggcattaaatggtactactggaaaggctcaggctattcgctcaaggccacaaccatgatgatccgaccagcagatttctaaacatcccagtccacctgaggaactgtctcgaattcg

SEQ ID NO: 27 - protein, 496 aa, Homo sapiens
MWQIVFFTLSCDLVLAAAYNNFRKSMDSIGKKQYQVQHGSCSYTFLLPEMDNCRSSSSPYVSNAVQRDAPLEYDDSVQRLQVLENIMENNTQWLMKLENYIQDNMKKEMVEIQQNAVQNQTAVMIEIGTNLLNQTAEQTRKLTDVEAQVLNQTTRLELQLLEHSLSTNKLEKQILDQTSEINKLQDKNSFLEKKVLAMEDKHIIQLQSIKEEKDQLQVLVSKQNSIIEELEKKIVTATVNNSVLQKQQHDLMETVNNLLTMMSTSNSAKDPTVAKEEQISFRDCAEVFKSGHTTNGIYTLTFPNSTEEIKAYCDMEAGGGGWTIIQRREDGSVDFQRTWKEYKVGFGNPSGEYWLGNEFVSQLTNQQRYVLKIHLKDWEGNEAYSLYEHFYLSSEELNYRIHLKGLTGTAGKISSISQPGNDFSTKDGDNDKCICKCSQMLTGGWWFDACGPSNLNGMYYPQRQNTNKFNGIKWYYWKGSGYSLKATTMMIRPADF

SEQ ID NO: 28 - DNA, 1535 bp, Mus musculus
  CDS (2)..(1492)
catgggatggcagatcattttcctaacttttggctgggatcttgtcttggcctcagcctacagtaactttaggaagagcgtggacagcacaggcagaaggcagtaccaggtccagaacggaccctgcagctacacgttcctgctgccggagaccgacagctgccgatcttcctccagcccctacatgtccaatgccgtgcagagggatgcacccctcgactacgacgactcagtgcaaaggctgcaggtgctggagaacattctagagaacaacacacagtggctgatgaagctggagaattacattcaggacaacatgaagaaggagatggtggagatccaacagaatgtggtgcagaaccagacagctgtgatgatagagattggaaccagcttgctgaaccagacagcagcacaaactcggaaactgactgatgtggaagcccaagtactaaaccagacgacaagactcgagctgcagcttctccaacattctatttctaccaacaaattggaaaagcagattttggatcagaccagtgaaataaacaagctacaaaataagaacagcttcctagaacagaaagttctggacatggagggcaagcacagcgagcagctacagtccatgaaggagcagaaggacgagctccaggtgctggtgtccaagcagagctctgtcattgacgagctggagaagaagctggtgacagccacggtcaacaactcgctccttcagaagcagcagcatgacctaatggagaccgtcaacagcttgctgaccatgatgtcatcacccaactccaagagctcggttgctatccgtaaagaagagcaaaccaccttcagagactgtgcggaaatcttcaagtcaggactcaccaccagtggcatctacacactgaccttccccaactccacagaggagatcaaggcctactgtgacatggacgtgggtggaggagggtggacagtcatccaacaccgagaagatggcagtgtggacttccagaggacgtggaaagaatacaaagagggcttcgggagccctctgggagagtactggctgggcaatgagtttgtctcccagctgaccggtcagcaccgctacgtgcttaagatccagctgaaggactgggaaggcaacgaggcgcattcgctgtatgatcacttctacctcgctggtgaagagtccaactacaggattcaccttacaggactcacggggaccgcgggcaaaataagtagcatcagccaaccaggaagtgattttagcacaaaggattcggacaatgacaaatgcatctgcaagtgttcccagatgctctcaggaggctggtggtttgacgcatgtggtccttccaacttgaatggacagtactacccacaaaaacagaatacaaataagtttaacggtatcaagtggtactactggaaggggtccggctactcgctcaaggccacaaccatgatgatccggccagcagatttctaaatgcctgcctacactaccagaagaacttgctgcatccaag

SEQ ID NO: 29 - protein, 497 aa, Mus musculus
MGWQIIFLTFGWDLVLASAYSNFRKSVDSTGRRQYQVQNGPCSYTFLLPETDSCRSSSSPYMSNAVQRDAPLDYDDSVQRLQVLENILENNTQWLMKLENYIQDNMKKEMVEIQQNVVQNQTAVMIEIGTSLLNQTAAQTRKLTDVEAQVLNQTTRLELQLLQHSISTNKLEKQILDQTSEINKLQNKNSFLEQKVLDMEGKHSEQLQSMKEQKDELQVLVSKQSSVIDELEKKLVTATVNNSLLQKQQHDLMETVNSLLTMMSSPNSKSSVAIRKEEQTTFRDCAEIFKSGLTTSGIYTLTFPNSTEEIKAYCDMDVGGGGWTVIQHREDGSVDFQRTWKEYKEGFGSPLGEYWLGNEFVSQLTGQHRYVLKIQLKDWEGNEAHSLYDHFYLAGEESNYRIHLTGLTGTAGKISSISQPGSDFSTKDSDNDKCICKCSQMLSGGWWFDACGPSNLNGQYYPQKQNTNKFNGIKWYYWKGSGYSLKATTMMIRPADF

SEQ ID NO: 30 - DNA, 1187 bp, Homo sapiens
  CDS (29)..(1183)
ctgagatcaccggcgaaggagggccaccatgtacaggatgcaactcctgtcttgcattgcactaagtcttgcacttgtcacgaattcggtgtatctctcagagtgcaagactgggaatggaaagaactacagagggacgatgtccaaaacaaaaaatggcatcacctgtcaaaaatggagttccacttctccccacagacctagattctcacctgctacacacccctcagagggactggaggagaactactgcaggaatccagacaacgatccgcaggggccctggtgctatactactgatccagaaaagagatatgactactgcgacattcttgagtgtgaagaggaatgtatgcattgcagtggagaaaactatgacggcaaaatttccaagaccatgtctggactggaatgccaggcctgggactctcagagcccacacgctcatggatacattccttccaaatttccaaacaagaacctgaagaagaattactgtcgtaaccccgatagggagctgcggccttggtctttcaccaccgaccccaacaagcgctgggaactttgtgacatcccccgctgcacaacacctccaccatcttctggtcccacctaccagtgtctgaagggaacaggtgaaaactatcgcgggaatgtggctgttaccgtgtccgggcacacctgtcagcactggagtgcacagacccctcacacacataacaggacaccagaaaacttcccctgcaaaaatttggatgaaaactactgccgcaatcctgacggaaaaagggccccatggtgccatacaaccaacagccaagtgcggtgggactactgtaagataccgtcctgtgactcctccccagtatccacggaacaattggctcccacagcaccacctgagctaacccctgtggtccaggactgctaccatggtgatggacagagctaccgaggcacatcctccaccaccaccacaggaaagaagtgtcagtcttggtcatctatgacaccacaccggcaccagaagaccccagaaaactacccaaatgctggcctgacaatgaactactgcaggaatccagatgccgataaaggcccctggtgttttaccacagaccccagcgtcaggtgggagtactgcaacctgaaaaaatgctcaggaacagaagcgagtgttgtatagg

SEQ ID NO: 31 - protein, 385 aa, Homo sapiens
MYRMQLLSCIALSLALVTNSVYLSECKTGNGKNYRGTMSKTKNGITCQKWSSTSPHRPRFSPATHPSEGLEENYCRNPDNDPQGPWCYTTDPEKRYDYCDILECEEECMHCSGENYDGKISKTMSGLECQAWDSQSPHAHGYIPSKFPNKNLKKNYCRNPDRELRPWSFTTDPNKRWELCDIPRCTTPPPSSGPTYQCLKGTGENYRGNVAVTVSGHTCQHWSAQTPHTHNRTPENFPCKNLDENYCRNPDGKRAPWCHTTNSQVRWDYCKIPSCDSSPVSTEQLAPTAPPELTPVVQDCYHGDGQSYRGTSSTTTTGKKCQSWSSMTPHRHQKTPENYPNAGLTMNYCRNPDADKGPWCFTTDPSVRWEYCNLKKCSGTEASVV

SEQ ID NO: 32 - DNA, 1180 bp, Mus musculus
  CDS (29)..(1177)
ctgagatcaccggcgaaggagggccaccatgtacaggatgcaactcctgtcttgcattgcactaagtcttgcacttgtcacgaattcggtgtatctgtcagaatgtaagaccggcatcggcaacggctacagaggaaccatgtccaggacaaagagtggtgttgcctgtcaaaagtggggtgccacgttcccccacgtacccaactactctcccagtacacatcccaatgagggactagaagagaactactgtaggaacccagacaatgatgaacaagggccttggtgctacactacagatccggacaagagatatgactactgcaacattcctgaatgtgaagaggaatgcatgtactgcagtggagaaaagtatgagggcaaaatctccaagaccatgtctggacttgactgccaggcctgggattctcagagcccacatgctcatggatacatccctgccaaatttccaagcaagaacctgaagatgaattattgccgcaaccctgacggggagccaaggccctggtgcttcacaacagaccccaccaaacgctgggaatactgtgacatcccccgctgcacaacacccccgcccccacccagcccaacctaccaatgtctgaaaggaagaggtgaaaattaccgagggaccgtgtctgtcaccgtgtctgggaaaacctgtcagcgctggagtgagcaaacccctcataggcacaacaggacaccagaaaatttcccctgcaaaaatctggaagagaactactgccggaacccagatggagaaactgctccctggtgctataccactgacagccagctgaggtgggagtactgtgagattccatcctgcgagtcctcagcatcaccagaccagtcagattcctcagttccaccagaggagcaaacacctgtggtccaggaatgctaccagagcgatgggcagagctatcggggtacatcgtccactaccatcacagggaagaagtgccagtcctgggcagctatgtttccacacaggcattcgaagaccccagagaacttcccagatgctggcttggagatgaactactgcaggaacccggatggtgacaagggcccttggtgctacaccactgacccgagcgtcaggtgggaatactgcaacctgaagcggtgctcagagacaggagggagttag

SEQ ID NO: 33 - protein, 383 aa, Mus musculus
MYRMQLLSCIALSLALVTNSVYLSECKTGIGNGYRGTMSRTKSGVACQKWGATFPHVPNYSPSTHPNEGLEENYCRNPDNDEQGPWCYTTDPDKRYDYCNIPECEEECMYCSGEKYEGKISKTMSGLDCQAWDSQSPHAHGYIPAKFPSKNLKMNYCRNPDGEPRPWCFTTDPTKRWEYCDIPRCTTPPPPPSPTYQCLKGRGENYRGTVSVTVSGKTCQRWSEQTPHRHNRTPENFPCKNLEENYCRNPDGETAPWCYTTDSQLRWEYCEIPSCESSASPDQSDSSVPPEEQTPVVQECYQSDGQSYRGTSSTTITGKKCQSWAAMFPHRHSKTPENFPDAGLEMNYCRNPDGDKGPWCYTTDPSVRWEYCNLKRCSETGGS

SEQ ID NO: 34 - DNA, 1460 bp, Homo sapiens
  CDS (27)..(1421)
ctgagatcaccggtaggagggccatcatgatttattccaatgtgataggaactgtaacctctggaaaaaggaaggtttatcttttgtccttgctgctcattggcttctgggactgcgtgacctgtcacgggagccctgtggacatctgcacagccaagccgcgggacattcccatgaatcccatgtgcatttaccgctccccggagaagaaggcaactgaggatgagggctcagaacagaagatcccggaggccaccaaccggcgtgtctgggaactgtccaaggccaattcccgctttgctaccactttctatcagcacctggcagattccaagaatgacaatgataacattttcctgtcacccctgagtatctccacggcttttgctatgaccaagcttggtgcctgtaatgacaccctccagcaactgatggaggtatttaagtttgacaccatatctgagaaaacatctgatcagatccacttcttctttgccaaactgaactgccgactctatcgaaaagccaacaaatcctccaagttagtatcagccaatcgcctttttggagacaaatcccttaccttcaatgagacctaccaggacatcagtgagttggtatatggagccaagctccagcccctggacttcaaggaaaatgcagagcaatccagagcggccatcaacaaatgggtgtccaataagaccgaaggccgaatcaccgatgtcattccctcggaagccatcaatgagctcactgttctggtgctggttaacaccatttacttcaagggcctgtggaagtcaaagttcagccctgagaacacaaggaaggaactgttctacaaggctgatggagagtcgtgttcagcatctatgatgtaccaggaaggcaagttccgttatcggcgcgtggctgaaggcacccaggtgcttgagttgcccttcaaaggtgatgacatcaccatggtcctcatcttgcccaagcctgagaagagcctggccaaggtagagaaggaactcaccccagaggtgctgcaagagtggctggatgaattggaggagatgatgctggtggtccacatgccccgcttccgcattgaggacggcttcagtttgaaggagcagctgcaagacatgggccttgtcgatctgttcagccctgaaaagtccaaactcccaggtattgttgcagaaggccgagatgacctctatgtctcagatgcattccataaggcatttcttgaggtaaatgaagaaggcagtgaagcagctgcaagtaccgctgttgtgattgctggccgttcgctaaaccccaacagggtgactttcaaggccaacaggcctttcctggtttttataagagaagttcctctgaacactattatcttcatgggcagagtagccaacccttgtgttaagtaaaatgttcttattctttgcacctcttcctatttttgg

SEQ ID NO: 35 - protein, 465 aa, Homo sapiens
MIYSNVIGTVTSGKRKVYLLSLLLIGFWDCVTCHGSPVDICTAKPRDIPMNPMCIYRSPEKKATEDEGSEQKIPEATNRRVWELSKANSRFATTFYQHLADSKNDNDNIFLSPLSISTAFAMTKLGACNDTLQQLMEVFKFDTISEKTSDQIHFFFAKLNCRLYRKANKSSKLVSANRLFGDKSLTFNETYQDISELVYGAKLQPLDFKENAEQSRAAINKWVSNKTEGRITDVIPSEAINELTVLVLVNTIYFKGLWKSKFSPENTRKELFYKADGESCSASMMYQEGKFRYRRVAEGTQVLELPFKGDDITMVLILPKPEKSLAKVEKELTPEVLQEWLDELEEMMLVVHMPRFRIEDGFSLKEQLQDMGLVDLFSPEKSKLPGIVAEGRDDLYVSDAFHKAFLEVNEEGSEAAASTAVVIAGRSLNPNRVTFKANRPFLVFIREVPLNTIIFMGRVANPCVK

SEQ ID NO: 36 - DNA, 1456 bp, Mus musculus
  CDS (27)..(1424)
ctgagatcaccggtaggagggccatcatgatttattcccctgggtcaggaagtggggctgctggtgagaggaagctttgtctcctctctctgctcctcatcggtgccttgggctgtgctatctgtcacgggaaccctgtggacgacatctgcatagcgaagccccgagacatccccgtgaatcccttgtgcatttaccgctcccctgggaagaaggccaccgaggaggatggctcagagcagaaggttccagaagccaccaaccggcgggtctgggaactgtccaaggccaattcgcgatttgccactaacttctaccagcacctggcagactccaagaatgacaacgacaacattttcctgtcacccttgagcatctccactgcttttgctatgaccaagctgggtgcctgtaacgacactctcaagcagctgatggaggtttttaaatttgataccatctccgagaagacatccgaccagatccacttcttctttgccaaactgaactgccgactctatcgaaaagccaacaagtcctctgacttggtatcagccaaccgcctttttggagacaaatccctcaccttcaacgagagctatcaagacgttagtgaggttgtctatggagccaagctccagcccttggacttcaaggagaatccggagcaatccagagtgaccatcaacaactgggtagctaataagactgaaggccgcatcaaagatgtcatcccacagggcgccattaacgagctcacggccctggtgctggttaacaccatttacttcaagggcctgtggaagtcaaagttcagccctgagaacacaaggaaggaaccgttctataaggtcgatgggcagtcatgcccagtgcctatgatgtaccaggaaggcaaattcaaataccggcgcgtggcagagggcacccaggtgctagagctgcccttcaagggggatgacatcaccatggtgctcatcctgcccaagcctgagaagagcctggccaaggtggagcaggagctcaccccagagctgctgcaggagtggctggatgagctgtcagagacgatgcttgtggtccacatgccccgcttccgcaccgaggatggcttcagtctgaaggagcagctgcaagacatgggcctcattgatctcttcagccctgaaaagtcccaactcccagggatcgttgctggaggcagggacgacctctatgtctccgacgcattccacaaagcatttcttgaggtaaatgaggaaggcagtgaagcagcagcgagtacttctgtcgtgattactggccggtcactgaaccccaatagggtgaccttcaaggccaacaggcccttcctggttcttataagggaagttgcactgaacactattatattcatggggagagtggctaatccttgtgtgaactaaaataatctttgcaccttttcctactttgg

SEQ ID NO: 37 - protein, 466 aa, Mus musculus
MIYSPGSGSGAAGERKLCLLSLLLIGALGCAICHGNPVDDICIAKPRDIPVNPLCIYRSPGKKATEEDGSEQKVPEATNRRVWELSKANSRFATNFYQHLADSKNDNDNIFLSPLSISTAFAMTKLGACNDTLKQLMEVFKFDTISEKTSDQIHFFFAKLNCRLYRKANKSSDLVSANRLFGDKSLTFNESYQDVSEVVYGAKLQPLDFKENPEQSRVTINNWVANKTEGRIKDVIPQGAINELTALVLVNTIYFKGLWKSKFSPENTRKEPFYKVDGQSCPVPMMYQEGKFKYRRVAEGTQVLELPFKGDDITMVLILPKPEKSLAKVEQELTPELLQEWLDELSETMLVVHMPRFRTEDGFSLKEQLQDMGLIDLFSPEKSQLPGIVAGGRDDLYVSDAFHKAFLEVNEEGSEAAASTSVVITGRSLNPNRVTFKANRPFLVLIREVALNTIIFMGRVANPCVN

SEQ ID NO: 38 - DNA, 492 bp, Homo sapiens
  CDS (27)..(488)
ctgagatcaccggtaggagggccatcatgagagccctgctggcgcgcctgcttctctgcgtcctggtcgtgagcgactccaaaggcagcaatgaacttcatcaagttccatcgaactgtgactgtctaaatggaggaacatgtgtgtccaacaagtacttctccaacattcactggtgcaactgcccaaagaaattcggagggcagcactgtgaaatagataagtcaaaaacctgctatgaggggaatggtcacttttaccgaggaaaggccagcactgacaccatgggccggccctgcctgccctggaactctgccactgtccttcagcaaacgtaccatgcccacagatctgatgctcttcagctgggcctggggaaacataattactgcaggaacccagacaaccggaggcgaccctggtgctatgtgcaggtgggcctaaagctgcttgtccaagagtgcatggtgcatgactgcgcagatggatgag

SEQ ID NO: 39 - protein, 154 aa, Homo sapiens
MRALLARLLLCVLVVSDSKGSNELHQVPSNCDCLNGGTCVSNKYFSNIHWCNCPKKFGGQHCEIDKSKTCYEGNGHFYRGKASTDTMGRPCLPWNSATVLQQTYHAHRSDALQLGLGKHNYCRNPDNRRRPWCYVQVGLKLLVQECMVHDCADG

SEQ ID NO: 40 - DNA, 495 bp, Mus musculus
  CDS (27)..(491)
ctgagatcaccggtaggagggccatcatgaaagtctggctggcgagcctgttcctctgcgccttggtggtgaaaaactctgaaggtggcagtgtacttggagctcctgatgaatcaaactgtggctgtcagaacggaggtgtatgcgtgtcctacaagtacttctccagaattcgccgatgcagctgcccaaggaaattccagggggagcactgtgagatagatgcatcaaaaacctgctatcatggaaatggtgactcttaccgaggaaaggccaacactgataccaaaggtcggccctgcctggcctggaatgcgcctgctgtccttcagaaaccctacaatgcccacagacctgatgctattagcctaggcctggggaaacacaattactgcaggaaccctgacaaccagaagcgaccctggtgctatgtgcagattggcctaaggcagtttgtccaagaatgcatggtgcatgactgctctcttagctgag

SEQ ID NO: 41 - protein, 155 aa, Mus musculus
MKVWLASLFLCALVVKNSEGGSVLGAPDESNCGCQNGGVCVSYKYFSRIRRCSCPRKFQGEHCEIDASKTCYHGNGDSYRGKANTDTKGRPCLAWNAPAVLQKPYNAHRPDAISLGLGKHNYCRNPDNQKRPWCYVQIGLRQFVQECMVHDCSLS

SEQ ID NO: 42 - DNA, 1395 bp, Homo sapiens
  CDS (2)..(1255)
catggctctgctatccgtgccgctgctgctcggcctcctcggcctggccgtcgccgagcctgccgtctacttcaaggagcagtttctggacggagacgggtggacttcccgctggatcgaatccaaacacaagtcagattttggcaaattcgttctcagttccggcaagttctacggtgacgaggagaaagataaaggtttgcagacaagccaggatgcacgcttttatgctctgtcggccagtttcgagcctttcagcaacaaaggccagacgctggtggtgcagttcacggtgaaacatgagcagaacatcgactgtgggggcggctatgtgaagctgtttcctaatagtttggaccagacagacatgcacggagactcagaatacaacatcatgtttggtcccgacatctgtggccctggcaccaagaaggttcatgtcatcttcaactacaagggcaagaacgtgctgatcaacaaggacatccgttgcaaggatgatgagtttacacacctgtacacactgattgtgcggccagacaacacctatgaggtgaagattgacaacagccaggtggagtccggctccttggaagacgattgggacttcctgccacccaagaagataaaggatcctgatgcttcaaaaccggaagactgggatgagcgggccaagatcgatgatcccacagactccaagcctgaggactgggacaagcccgagcatatccctgaccctgatgctaagaagcccgaggactgggatgaagagatggacggagagtgggaacccccagtgattcagaaccctgagtacaagggtgagtggaagccccggcagatcgacaacccagattacaagggcacttggatccacccagaaattgacaaccccgagtattctcccgatcccagtatctatgcctatgataactttggcgtgctgggcctggacctctggcaggtcaagtctggcaccatctttgacaacttcctcatcaccaacgatgaggcatacgctgaggagtttggcaacgagacgtggggcgtaacaaaggcagcagagaaacaaatgaaggacaaacaggacgaggagcagaggcttaaggaggaggaagaagacaagaaacgcaaagaggaggaggaggcagaggacaaggaggatgatgaggacaaagatgaggatgaggaggatgaggaggacaaggaggaagatgaggaggaagatgtccccggccaggccaaggacgagctgtagagaggcctgcctccagggctggactgaggcctgagcgctcctgccgcagagcttgccgcgccaaataatgtctctgtgagactcgagaactttcatttttttccaggctggttcggatttggggtggattttggttg

SEQ ID NO: 43 - protein, 418 aa, Homo sapiens
MALLSVPLLLGLLGLAVAEPAVYFKEQFLDGDGWTSRWIESKHKSDFGKFVLSSGKFYGDEEKDKGLQTSQDARFYALSASFEPFSNKGQTLVVQFTVKHEQNIDCGGGYVKLFPNSLDQTDMHGDSEYNIMFGPDICGPGTKKVHVIFNYKGKNVLINKDIRCKDDEFTHLYTLIVRPDNTYEVKIDNSQVESGSLEDDWDFLPPKKIKDPDASKPEDWDERAKIDDPTDSKPEDWDKPEHIPDPDAKKPEDWDEEMDGEWEPPVIQNPEYKGEWKPRQIDNPDYKGTWIHPEIDNPEYSPDPSIYAYDNFGVLGLDLWQVKSGTIFDNFLITNDEAYAEEFGNETWGVTKAAEKQMKDKQDEEQRLKEEEEDKKRKEEEEAEDKEDDEDKDEDEEDEEDKEEDEEEDVPGQAKDEL

SEQ ID NO: 44 - DNA, 1300 bp, Mus musculus
  CDS (2)..(1252)
catggctctcctttcggtgccgctcctgcttggcctcctcggcctggccgccgcagaccctgccatctatttcaaagagcagttcttggacggagatgcctggaccaaccgctgggtcgaatccaaacataagtccgattttggcaaatttgtcctcagttctggcaaattttacggggacctggagaaggataaagggctgcagacaagccaagatgcccgattttacgcactgtccgccaaattcgaacccttcagcaataagggccagacactggtggtacagttcacggtgaagcatgagcagaatatcgactgtgggggcggctacgtgaagctgtttccgagtggcttggaccagaaggacatgcatggagactcagaatataacatcatgtttggtccggacatctgcggtcctggcaccaagaaggttcatgtcatctttaactacaagggcaagaatgtgctgatcaacaaggatatccggtgtaaggatgatgaattcacacacctatacacactgattgtgcggccagacaacacctatgaggtgaaaattgacaacagccaggtggagtcaggctccttggaggatgattgggactttctgccacccaagaagataaaggaccctgatgctgccaagccggaagactgggatgaacgagccaagatcgatgaccccacagattccaagcctgaggactgggacaagccagagcacatccctgaccctgatgctaagaagcctgaggactgggatgaagagatggatggagagtgggaaccaccagtgattcaaaatcctgaatacaagggcgagtggaaaccacgtcaaattgacaacccagattacaagggtacctggatacacccagaaattgacaaccctgaatactcccccgatgcaaatatctatgcctatgatagttttgctgtactgggcctagatctctggcaggtcaagtctgggacaatctttgacaatttcctcatcaccaatgatgaggcctatgcagaggagtttggcaatgagacgtggggtgttaccaaggctgcagagaagcagatgaaggacaagcaggatgaggagcagaggcttaaggaagaagaagaggacaagaagcgtaaagaggaagaagaagctgaggataaagaggatgatgatgacagagatgaagatgaggacgaagaagatgagaaggaggaagatgaggaagaatcccctggccaagccaaggatgagctgtagaggccacaccacctgccttcagggctggactgaggcctgaacacg

SEQ ID NO: 45 - protein, 417 aa, Mus musculus
MALLSVPLLLGLLGLAAADPAIYFKEQFLDGDAWTNRWVESKHKSDFGKFVLSSGKFYGDLEKDKGLQTSQDARFYALSAKFEPFSNKGQTLVVQFTVKHEQNIDCGGGYVKLFPSGLDQKDMHGDSEYNIMFGPDICGPGTKKVHVIFNYKGKNVLINKDIRCKDDEFTHLYTLIVRPDNTYEVKIDNSQVESGSLEDDWDFLPPKKIKDPDAAKPEDWDERAKIDDPTDSKPEDWDKPEHIPDPDAKKPEDWDEEMDGEWEPPVIQNPEYKGEWKPRQIDNPDYKGTWIHPEIDNPEYSPDANIYAYDSFAVLGLDLWQVKSGTIFDNFLITNDEAYAEEFGNETWGVTKAAEKQMKDKQDEEQRLKEEEEDKKRKEEEEAEDKEDDDDRDEDEDEEDEKEEDEEESPGQAKDEL

SEQ ID NO: 46 - DNA, 620 bp, Homo sapiens
  CDS (29)..(616)
ctgagatcaccggcgaaggagggccaccatgtacaggatgcaactcctgtcttgcattgcactaagtcttgcacttgtcacgaattcttatgagaagcctgctctgcatttggctgctctgaacatgccattttctggggacattcgagctgattttcagtgcttcaagcaggccagagctgcaggactgttgtccacctaccgagcattcttatcttcccatttgcaagatctgtccaccattgtgaggaaagcagagagatacagccttcccatagtgaacctcaagggccaagtactttttaataattgggactcaattttttctggccacggaggtcagttcaatatgcatattccaatatactcctttgatggtcgagacataatgacagatccttcttggccccagaaagtcatttggcatggctccagcccccatggcgtccgccttgtggataactactgtgaagcatggcgaaccgcggacacagcggtcacgggacttgcctccccgctgagcacggggaagattctggaccagaaagcatacagctgtgctaatcggctaattgtcctatgtatcgaaaacagtttcatgacagacgctaggaagtaag

SEQ ID NO: 47 - protein, 196 aa, Homo sapiens
MYRMQLLSCIALSLALVTNSYEKPALHLAALNMPFSGDIRADFQCFKQARAAGLLSTYRAFLSSHLQDLSTIVRKAERYSLPIVNLKGQVLFNNWDSIFSGHGGQFNMHIPIYSFDGRDIMTDPSWPQKVIWHGSSPHGVRLVDNYCEAWRTADTAVTGLASPLSTGKILDQKAYSCANRLIVLCIENSFMTDARK

SEQ ID NO: 48 - DNA, 620 bp, Mus musculus
  CDS (29)..(616)
ctgagatcaccggcgaaggagggccaccatgtacaggatgcaactcctgtcttgcattgcactaagtcttgcacttgtcacgaattcctatgagaggcctgttctgcacctggttgctctgaacacaccggtggctggggacatccgagctgatttccagtgcttccagcaggccagggctgcaggcctcctgtccactttccgagcctttctgtcttcacacctgcaggatctctccacagtcgtgcggaaggcagagaggttcggccttccaattgtgaatctcaagggccaagtgctttttaacaattgggactcgatattttctggtgatggaggtcaattcaatacacacattccaatctactcctttgacggtcgggatgtgatgactgatccttcctggccccagaaggtggtctggcacggctccaacccccatggtgtccgtcttgtggacaagtactgtgaagcctggcgaaccacggacatggcagtaaccggatttgcctccccactgagcacagggaagattctggaccagaaagcttacagctgtgctaacaggctaatcgtgctgtgcatcgaaaacagtttcatgacagacactaggaagtgag

SEQ ID NO: 49 - protein, 196 aa, Mus musculus
MYRMQLLSCIALSLALVTNSYERPVLHLVALNTPVAGDIRADFQCFQQARAAGLLSTFRAFLSSHLQDLSTVVRKAERFGLPIVNLKGQVLFNNWDSIFSGDGGQFNTHIPIYSFDGRDVMTDPSWPQKVVWHGSNPHGVRLVDKYCEAWRTTDMAVTGFASPLSTGKILDQKAYSCANRLIVLCIENSFMTDTRK

SEQ ID NO: 50 - DNA, 651 bp, Homo sapiens
  CDS (29)..(640)
ctgagatcaccggcgaaggagggccaccatgtacaggatgcaactcctgtcttgcattgcactaagtcttgcacttgtcacgaattcggcccacagccaccgcgacttccagccggtgctccacctggttgcgctcaacagccccctgtcaggcggcatgcggggcatccgcggggccgacttccagtgcttccagcaggcgcgggccgtggggctggcgggcaccttccgcgccttcctgtcctcgcgcctgcaggacctgtacagcatcgtgcgccgtgccgaccgcgcagccgtgcccatcgtcaacctcaaggacgagctgctgtttcccagctgggaggctctgttctcaggctctgagggtccgctgaagcccggggcacgcatcttctcctttgacggcaaggacgtcctgaggcaccccacctggccccagaagagcgtgtggcatggctcggaccccaacgggcgcaggctgaccgagagctactgtgagacgtggcggacggaggctccctcggccacgggccaggcctcctcgctgctggggggcaggctcctggggcagagtgccgcgagctgccatcacgcctacatcgtgctctgcattgagaacagcttcatgactgcctccaagtaggctagctc

SEQ ID NO: 51 - protein, 204 aa, Homo sapiens
MYRMQLLSCIALSLALVTNSAHSHRDFQPVLHLVALNSPLSGGMRGIRGADFQCFQQARAVGLAGTFRAFLSSRLQDLYSIVRRADRAAVPIVNLKDELLFPSWEALFSGSEGPLKPGARIFSFDGKDVLRHPTWPQKSVWHGSDPNGRRLTESYCETWRTEAPSATGQASSLLGGRLLGQSAASCHHAYIVLCIENSFMTASK

SEQ ID NO: 52 - DNA, 689 bp, Mus musculus
  CDS (29)..(643)
ctgagatcaccggcgaaggagggccaccatgtacaggatgcaactcctgtcttgcattgcactaagtcttgcacttgtcacgaattcggctcatactcatcaggactttcagccagtgctccacctggtggcactgaacacccccctgtctggaggcatgcgtggtatccgtggagcagatttccagtgcttccagcaagcccgagccgtggggctgtcgggcaccttccgggctttcctgtcctctaggctgcaggatctctatagcatcgtgcgccgtgctgaccgggggtctgtgcccatcgtcaacctgaaggacgaggtgctatctcccagctgggactccctgttttctggctcccagggtcaactgcaacccggggcccgcatcttttcttttgacggcagagatgtcctgagacacccagcctggccgcagaagagcgtatggcacggctcggaccccagtgggcggaggctgatggagagttactgtgagacatggcgaactgaaactactggggctacaggtcaggcctcctccctgctgtcaggcaggctcctggaacagaaagctgcgagctgccacaacagctacatcgtcctgtgcattgagaatagcttcatgacctctttctccaaatagggcctctgccagctagggtggcagacagaggccatgctagctc

SEQ ID NO: 53 - protein, 205 aa, Mus musculus
MYRMQLLSCIALSLALVTNSAHTHQDFQPVLHLVALNTPLSGGMRGIRGADFQCFQQARAVGLSGTFRAFLSSRLQDLYSIVRRADRGSVPIVNLKDEVLSPSWDSLFSGSQGQLQPGARIFSFDGRDVLRHPAWPQKSVWHGSDPSGRRLMESYCETWRTETTGATGQASSLLSGRLLEQKAASCHNSYIVLCIENSFMTSFSK

SEQ ID NO: 54 - DNA, 333 bp, Homo sapiens
  CDS (29)..(322)
ctgagatcaccggcgaaggagggccaccatgaatcaaactgccattctgatttgctgccttatctttctgactctaagtggcattcaaggagtacctctctctagaactgtacgctgtacctgcatcagcattagtaatcaacctgttaatccaaggtctttagaaaaacttgaaattattcctgcaagccaattttgtccacgtgttgagatcattgctacaatgaaaaagaagggtgagaagagatgtctgaatccagaatcgaaggccatcaagaatttactgaaagcagttagcaaggaaaggtctaaaagatctccttaagctagctc

SEQ ID NO: 55 - protein, 98 aa, Homo sapiens
MNQTAILICCLIFLTLSGIQGVPLSRTVRCTCISISNQPVNPRSLEKLEIIPASQFCPRVEIIATMKKKGEKRCLNPESKAIKNLLKAVSKERSKRSP

SEQ ID NO: 56 - DNA, 389 bp, Mus musculus
  CDS (27)..(320)
ctgagatcaccggtaggagggccatcatgaacccaagtgctgccgtcattttctgcctcatcctgctgggtctgagtgggactcaagggatccctctcgcaaggacggtccgctgcaactgcatccatatcgatgacgggccagtgagaatgagggccatagggaagcttgaaatcatccctgcgagcctatcctgcccacgtgttgagatcattgccacgatgaaaaagaatgatgagcagagatgtctgaatccggaatctaagaccatcaagaatttaatgaaagcgtttagccaaaaaaggtctaaaagggctccttaactggagtgaagccacgcacacaccccggtgctgcgatggatggacagcagagagcctcgctagctc

SEQ ID NO: 57 - protein, 98 aa, Mus musculus
MNPSAAVIFCLILLGLSGTQGIPLARTVRCNCIHIDDGPVRMRAIGKLEIIPASLSCPRVEIIATMKKNDEQRCLNPESKTIKNLMKAFSQKRSKRAP

SEQ ID NO: 58 - DNA, 1451 bp, Homo sapiens
  CDS (29)..(1447)
ctgagatcaccggcgaaggagggccaccatgtacaggatgcaactcctgtcttgcattgcactaagtcttgcacttgtcacgaattctaaagtgtatctctcagagtgcaagactgggaatggaaagaactacagagggacgatgtccaaaacaaaaaatggcatcacctgtcaaaaatggagttccacttctccccacagacctagattctcacctgctacacacccctcagagggactggaggagaactactgcaggaatccagacaacgatccgcaggggccctggtgctatactactgatccagaaaagagatatgactactgcgacattcttgagtgtgaagaggaatgtatgcattgcagtggagaaaactatgacggcaaaatttccaagaccatgtctggactggaatgccaggcctgggactctcagagcccacacgctcatggatacattccttccaaatttccaaacaagaacctgaagaagaattactgtcgtaaccccgatagggagctgcggccttggtgtttcaccaccgaccccaacaagcgctgggaactttgtgacatcccccgctgcacaacacctccaccatcttctggtcccacctaccagtgtctgaagggaacaggtgaaaactatcgcgggaatgtggctgttaccgtgtccgggcacacctgtcagcactggagtgcacagacccctcacacacataacaggacaccggaaaactttccctgcaaaaatttggatgaaaactactgccgcaatcctgacggaaaaagggccccatggtgccatacaaccaacagccaagtgcggtgggagtactgtaagataccgtcctgtgactcctccccagtatccacggaacaattggctcccacagcaccacctgagctaacccctgtggtccaggactgctaccatggtgatggacagagctaccgaggcacatcctccaccaccaccacaggaaagaagtgtcagtcttggtcatctatgacaccacaccggcaccagaagaccccagaaaactacccaaatgctggcctgacaatgaactactgcaggaatccagatgccgataaaggcccctggtgttttaccacagaccccagcgtcaggtgggagtactgcaacctgaaaaaatgctcaggaacagaagcgagtgttgtagcacctccgcctgttgtcctgcttccagatgtagagactccttccgaagaagactgtatgtttgggaatgggaaaggataccgaggcaagagggcgaccactgttactgggacgccatgccaggactgggctgcccaggagccccatagacacagcattttcactccagagacaaatccacgggcgggtctggaaaaaaattactgccgtaaccctgatggtgatgtaggtggtccctggtgctacacgacaaatccaagataag

SEQ ID NO: 59 - protein, 473 aa, Homo sapiens
MYRMQLLSCIALSLALVTNSKVYLSECKTGNGKNYRGTMSKTKNGITCQKWSSTSPHRPRFSPATHPSEGLEENYCRNPDNDPQGPWCYTTDPEKRYDYCDILECEEECMHCSGENYDGKISKTMSGLECQAWDSQSPHAHGYIPSKFPNKNLKKNYCRNPDRELRPWCFTTDPNKRWELCDIPRCTTPPPSSGPTYQCLKGTGENYRGNVAVTVSGHTCQHWSAQTPHTHNRTPENFPCKNLDENYCRNPDGKRAPWCHTTNSQVRWEYCKIPSCDSSPVSTEQLAPTAPPELTPVVQDCYHGDGQSYRGTSSTTTTGKKCQSWSSMTPHRHQKTPENYPNAGLTMNYCRNPDADKGPWCFTTDPSVRWEYCNLKKCSGTEASVVAPPPVVLLPDVETPSEEDCMFGNGKGYRGKRATTVTGTPCQDWAAQEPHRHSIFTPETNPRAGLEKNYCRNPDGDVGGPWCYTTNPR

SEQ ID NO: 60 - DNA, 1451 bp, Mus musculus
  CDS (29)..(1447)
ctgagatcaccggcgaaggagggccaccatgtacaggatgcaactcctgtcttgcattgcactaagtcttgcacttgtcacgaattctagagtgtatctgtcagaatgtaagaccggcatcggcaacggctacagaggaaccatgtccaggacaaagagtggtgttgcctgtcaaaagtggggtgccacgttcccccacgtacccaactactctcccagtacacatcccaatgagggactagaagagaactactgtaggaacccagacaatgatgaacaagggccttggtgctacactacagatccggacaagagatatgactactgcaacattcctgaatgtgaagaggaatgcatgtactgcagtggagaaaagtatgagggcaaaatctccaagaccatgtctggacttgactgccaggcctgggattctcagagcccacatgctcatggatacatccctgccaaatttccaagcaagaacctgaagatgaattattgccgcaaccctgacggggagccaaggccctggtgcttcacaacagaccccaccaaacgctgggaatactgtgacatcccccgctgcacaacacccccgcccccacccagcccaacctaccaatgtctgaaaggaagaggtgaaaattaccgagggaccgtgtctgtcaccgtgtctgggaaaacctgtcagcgctggagtgagcaaacccctcataggcacaacaggacaccagaaaatttcccctgcaaaaatctggaagagaactactgccggaacccagatggagaaactgctccctggtgctataccactgacagccagctgaggtgggagtactgtgagattccatcctgcgagtcctcagcatcaccagaccagtcagattcctcagttccaccagaggagcaaacacctgtggtccaggaatgctaccagagcgatgggcagagctatcggggtacatcgtccactaccatcacagggaagaagtgccagtcctgggcagctatgtttccacacaggcattcgaagaccccagagaacttcccagatgctggcttggagatgaactactgcaggaacccggatggtgacaagggcccttggtgctacaccactgacccgagcgtcaggtgggaatactgcaacctgaagcggtgctcagagacaggagggagtgttgtggaattgcccacagtttcccaggaaccaagtgggccgagcgactctgagacagactgcatgtatgggaatggcaaagactatcggggcaaaacggccgtcactgcagctggcaccccctgccagggatgggctgcccaggagccccacaggcacagcatcttcaccccacagacaaacccacgggcaggtctggaaaagaactactgccgaaacccagatggggatgtgaatggtccttggtgctatacaacaaaccccagatgag

SEQ ID NO: 61 - protein, 473 aa, Mus musculus
MYRMQLLSCIALSLALVTNSRVYLSECKTGIGNGYRGTMSRTKSGVACQKWGATFPHVPNYSPSTHPNEGLEENYCRNPDNDEQGPWCYTTDPDKRYDYCNIPECEEECMYCSGEKYEGKISKTMSGLDCQAWDSQSPHAHGYIPAKFPSKNLKMNYCRNPDGEPRPWCFTTDPTKRWEYCDIPRCTTPPPPPSPTYQCLKGRGENYRGTVSVTVSGKTCQRWSEQTPHRHNRTPENFPCKNLEENYCRNPDGETAPWCYTTDSQLRWEYCEIPSCESSASPDQSDSSVPPEEQTPVVQECYQSDGQSYRGTSSTTITGKKCQSWAAMFPHRHSKTPENFPDAGLEMNYCRNPDGDKGPWCYTTDPSVRWEYCNLKRCSETGGSVVELPTVSQEPSGPSDSETDCMYGNGKDYRGKTAVTAAGTPCQGWAAQEPHRHSIFTPQTNPRAGLEKNYCRNPDGDVNGPWCYTTNPR

SEQ ID NO: 62 - DNA, 401 bp, Homo sapiens
  CDS (29)..(391)
ctgagatcaccggcgaaggagggccaccatgtacaggatgcaactcctgtcttgcattgcactaagtcttgcacttgtcacgaattcgcctgttgtcctgcttccagatgtagagactccttccgaagaacactgtatgtttgggaatgggaaaggataccgaggcaagagggcgaccactgttactgggacgccatgccaggactgggctgcccaggagccccatagacacagcattttcactccagagacaaatccacgggcgggtctggaaaaaaattactgccgtaaccctgatggtgatgtaggtggtccctggtgctacacgacaaatccaagaaaactttacgactactgtgatgtccctcagtgtgcggccccttcatttgattagctagctc

SEQ ID NO: 63 - protein, 121 aa, Homo sapiens
MYRMQLLSCIALSLALVTNSPVVLLPDVETPSEEHCMFGNGKGYRGKRATTVTGTPCQDWAAQEPHRHSIFTPETNPRAGLEKNYCRNPDGDVGGPWCYTTNPRKLYDYCDVPQCAAPSFD

SEQ ID NO: 64 - DNA, 1210 bp, Mus musculus
  CDS (27)..(1154)
ctgagatcaccggtaggagggccatcatgattgatgccctgagactggcaaattcagcttttgctgttgacttgttcaaacaactatgtgaaagggacccagcaggaaacattctcttctctccaatatgcctctctacttctctgtcccttgcgcaagtgggcaccaaaggcgacacagcaaatgaaattggacaggtccttcattttgagaatgtcaaagatgtaccctttgggtttcaaacagtcacttctgatgttaataagctcagttctttttactctttgaaacttgtcaagcgactctacatagacaaatctctgaacccttctacagaatttatcagttctaccaaaagaccatatgcaaaagaattggaaactgttgacttcaaagacaaactggaagaaacgaaaggtcaaattaacagctccattaaggagctcacagatggccactttgaggacattttgtcagagaacagtataagtgaccagaccaaaatccttgtggttaatgctgcctactttgttggaaagtggatgaagaaatttccggaatcagaaacaaaagaatgtcctttcagaatcagcaagacagacaccaaacccgtacaaatgatgaatcttgaggccactttctgcttgggtaacattgatgacatcagctgtaagatcatagaacttcctttccagaataagcatctgagtatgctcattgtgctccccaaggacgtggaggatgagtccacaggcctggagaagattgaacagcaactcaacccagaaacattgttacagtggaccaaccccagtaccatggccaatgccaaagtcaaactttccctcccaaagtttaaggtagaaaagatgattgatcccaaggctagtctggaaagcctagggctgaaaagtctcttcaatgaaagtacatcggatttctctggaatgtcagagaccaagggagtgtccctgtcaaatgtgattcatagagtatgcctagaaataaccgaagatggtggtgagtccatcgaggtgccagggtcccggatcttacagcacaaggatgaattcaatgctgaccatccatttatttatatcattagacacaacaaaactcgaaacatcattttctttggcaaattctgttctccttagctggcagggccttgccaagtctcagggaacttgtctgtagtcgcagagctctg

SEQ ID NO: 65 - protein, 376 aa, Mus musculus
MIDALRLANSAFAVDLFKQLCERDPAGNILFSPICLSTSLSLAQVGTKGDTANEIGQVLHFENVKDVPFGFQTVTSDVNKLSSFYSLKLVKRLYIDKSLNPSTEFISSTKRPYAKELETVDFKDKLEETKGQINSSIKELTDGHFEDILSENSISDQTKILVVNAAYFVGKWMKKFPESETKECPFRISKTDTKPVQMMNLEATFCLGNIDDISCKIIELPFQNKHLSMLIVLPKDVEDESTGLEKIEQQLNPETLLQWTNPSTMANAKVKLSLPKFKVEKMIDPKASLESLGLKSLFNESTSDFSGMSETKGVSLSNVIHRVCLEITEDGGESIEVPGSRILQHKDEFNADHPFIYIIRHNKTRNIIFFGKFCSP

SEQ ID NO: 66 - DNA, 495 bp, Homo sapiens
  CDS (27)..(401)
ctgagatcaccggtaggagggccatcatgaagaaaagtggtgttcttttcctcttgggcatcatcttgctggttctgattggagtgcaaggaaccccagtagtgagaaagggtcgctgttcctgcatcagcaccaaccaagggactatccacctacaatccttgaaagaccttaaacaatttgccccaagcccttcctgcgagaaaattgaaatcattgctacactgaagaatggagttcaaacatgtctaaacccagattcagcagatgtgaaggaactgattaaaaagtgggagaaacaggtcagccaaaagaaaaagcaaaagaatgggaaaaaacatcaaaaaaagaaagttctgaaagttcgaaaatctcaacgttctcgtcaaaagaagactacataagagaccacttcaccaataagtattctgtgttaaaaatgttctattttaattataccgctatcattccaaaggaggatggcatagctagctc

SEQ ID NO: 67 - protein, 125 aa, Homo sapiens
MKKSGVLFLLGIILLVLIGVQGTPVVRKGRCSCISTNQGTIHLQSLKDLKQFAPSPSCEKIEIIATLKNGVQTCLNPDSADVKELIKKWEKQVSQKKKQKNGKKHQKKKVLKVRKSQRSRQKKTT

SEQ ID NO: 68 - DNA, 446 bp, Mus musculus
  CDS (29)..(406)
ctgagatcaccggcgaaggagggccaccatgaagtccgctgttcttttcctcttgggcatcatcttcctggagcagtgtggagttcgaggaaccctagtgataaggaatgcacgatgctcctgcatcagcaccagccgaggcacgatccactacaaatccctcaaagacctcaaacagtttgccccaagccccaattgcaacaaaactgaaatcattgctacactgaagaacggagatcaaacctgcctagatccggactcggcaaatgtgaagaagctgatgaaagaatgggaaaagaagatcagccaaaagaaaaagcaaaagagggggaaaaaacatcaaaagaacatgaaaaacagaaaacccaaaacaccccaaagtcgtcgtcgttcaaggaagactacataagagaccattactttaccaacaagcaccctgctagctc

SEQ ID NO: 69 - protein, 126 aa, Mus musculus
MKSAVLFLLGIIFLEQCGVRGTLVIRNARCSCISTSRGTIHYKSLKDLKQFAPSPNCNKTEIIATLKNGDQTCLDPDSANVKKLMKEWEKKISQKKKQKRGKKHQKNMKNRKPKTPQSRRRSRKTT

SEQ ID NO: 70 - DNA, 1309 bp, Homo sapiens
  CDS (27)..(1280)
ctgagatcaccggtaggagggccagcatgcaggccctggtgctactcctctgcattggagccctcctcgggcacagcagctgccagaaccctgccagccccccggaggagggctccccagaccccgacagcacaggggcgctggtggaggaggaggatcctttcttcaaagtccccgtgaacaagctggcagcggctgtctccaacttcggctatgacctgtaccgggtgcgatccagcacgagccccacgaccaacgtgctcctgtctcctctcagtgtggccacggccctctcggccctctcgctgggagcggagcagcgaacagaatccatcattcaccgggctctctactatgacttgatcagcagcccagacatccatggtacctataaggagctccttgacacggtcaccgccccccagaagaacctcaagagtgcctcccggatcgtctttgagaagaagctgcgcataaaatccagctttgtggcacctctggaaaagtcatatgggaccaggcccagagtcctgacgggcaaccctcgcttggacctgcaagagatcaacaactgggtgcaggcgcagatgaaagggaagctcgccaggtccacaaaggaaattcccgatgagatcagcattctccttctcggtgtggcgcacttcaaggggcagtgggtaacaaagtttgactccagaaagacttccctcgaggatttctacttggatgaagagaggaccgtgagggtccccatgatgtcggaccctaaggctgttttacgctatggcttggattcagatctcagctgcaagattgcccagctgcccttgaccggaagcatgagtatcatcttcttcctgcccctgaaagtgacccagaatttgaccttgatagaggagagcctcacctccgagttcattcatgacatagaccgagaactgaagaccgtgcaggcggtcctcactgtccccaagctgaagctgagttatgaaggcgaagtcaccaagtccctgcaggagatgaagctgcaatccttgtttgattcaccagactttagcaagatcacaggcaaacccatcaagctgactcaggtggaacaccgggctggctttgagtggaacgaggatggggcgggaaccacccccagcccagggctgcagcctgcccacctcaccttcccgctggactatcaccttaaccagcctttcatcttcgtactgagggacacagacacaggggcccttctcttcattggcaagattctggaccccaggggcccctaatatcccagtttaatattccaataccg

SEQ ID NO: 71 - protein, 418 aa, Homo sapiens
MQALVLLLCIGALLGHSSCQNPASPPEEGSPDPDSTGALVEEEDPFFKVPVNKLAAAVSNFGYDLYRVRSSTSPTTNVLLSPLSVATALSALSLGAEQRTESIIHRALYYDLISSPDIHGTYKELLDTVTAPQKNLKSASRIVFEKKLRIKSSFVAPLEKSYGTRPRVLTGNPRLDLQEINNWVQAQMKGKLARSTKEIPDEISILLLGVAHFKGQWVTKFDSRKTSLEDFYLDEERTVRVPMMSDPKAVLRYGLDSDLSCKIAQLPLTGSMSIIFFLPLKVTQNLTLIEESLTSEFIHDIDRELKTVQAVLTVPKLKLSYEGEVTKSLQEMKLQSLFDSPDFSKITGKPIKLTQVEHRAGFEWNEDGAGTTPSPGLQPAHLTFPLDYHLNQPFIFVLRDTDTGALLFIGKILDPRGP

SEQ ID NO: 72 - DNA, 1317 bp, Mus musculus
  CDS (27)..(1277)
ctgagatcaccggtaggagggccagcatgcaggccctggtgctactcctctggactggagccctgctcgggcacggcagcagccagaacgtccccagcagctctgagggctccccagtcccggacagcacgggcgagcccgtggaggaggaggaccccttcttcaaggtccctgtgaacaagctggcagcagctgtctccaacttcggctacgatctgtaccgcctgagatccagtgccagcccaacgggcaacgtcctgctgtctccactcagcgtggccacggccctctctgccctttctctgggagctgaacatcgaacagagtctgtcattcaccgggctctctactacgacctgatcaccaaccctgacatccacagcacctacaaggagctccttgcctctgttactgcccctgagaagaacctcaagagtgcttccagaattgtgtttgagaggaaacttcgagtcaaatccagctttgttgcccctctggagaagtcctatgggaccaggccccggatcctcacgggcaaccctcgagtagaccttcaggagattaacaactgggtgcaggcccagatgaaagggaagattgcccggtccacgagggaaatgcccagtgccctcagcatccttctccttggcgtggcttacttcaaggggcagtgggtaaccaagtttgactcgagaaagacgaccctccaggattttcatttggacgaggacaggaccgtgagagtccccatgatgtcagatcctaaggccatcttacgatacggcttggactctgatctcaactgcaagattgcccagctgcccttgacaggaagtatgagcatcatcttcttcctgcccctgaccgtgacccagaacttgaccatgatagaagagagcctcacctctgagttcattcatgacatcgaccgagaactgaagactatccaagctgtgctgactgtccccaagctgaagctgagcttcgaaggcgaacttaccaagtctctgcaggacatgaagctacagtcgttgtttgaatcacccgacttcagcaagattactggcaaacccgtgaagctcacccaagtggaacacagggctgctttcgagtggaatgaagagggggcaggaagcagccccagcccaggcctccagcccgtccgcctcaccttcccgctagactatcaccttaaccaacctttcctctttgttctgagggacacggacacgggggccctcctcttcataggcagaatcctggaccccagtagtacttaatgtctcagtgctctacagaacccccagagggaagctg

SEQ ID NO: 73 - protein, 417 aa, Mus musculus
MQALVLLLWTGALLGHGSSQNVPSSSEGSPVPDSTGEPVEEEDPFFKVPVNKLAAAVSNFGYDLYRLRSSASPTGNVLLSPLSVATALSALSLGAEHRTESVIHRALYYDLITNPDIHSTYKELLASVTAPEKNLKSASRIVFERKLRVKSSFVAPLEKSYGTRPRILTGNPRVDLQEINNWVQAQMKGKIARSTREMPSALSILLLGVAYFKGQWVTKFDSRKTTLQDFHLDEDRTVRVPMMSDPKAILRYGLDSDLNCKIAQLPLTGSMSIIFFLPLTVTQNLTMIEESLTSEFIHDIDRELKTIQAVLTVPKLKLSFEGELTKSLQDMKLQSLFESPDFSKITGKPVKLTQVEHRAAFEWNEEGAGSSPSPGLQPVRLTFPLDYHLNQPFLFVLRDTDTGALLFIGRILDPSST

SEQ ID NO: 74 - DNA, 711 bp, Homo sapiens
  CDS (29)..(664)
ctgagatcaccggcgaaggagggccaccatgtacaggatgcaactcctgtcttgcattgcactaagtcttgcacttgtcacgaattcgtgcaaacaggacattgtatttgatggcatccctcagatccgtggtgagatcttcttcttcaaggaccggttcatttggcggactgtgacgccacgtgacaagcccatggggcccctgctggtggccacattctggcctgagctcccggaaaagattgatgcggtatacgaggccccacaggaggagaaggctgtgttctttgcagggaatgaatactggatctactcagccagcaccttggagcgagggtaccccaagccactgaccagcctgggactgccccctgatgtccagcgagtggatgccgcctttaactggagcaaaaacaagaagacatacatctttgctggagacaaattctggagatacaatgaggtgaagaagaaaatggatcctggctttcccaagctcatcgcagatgcctggaatgccatccccgataacctggatgccgtcgtggacctgcagggcggcggtcacagctacttcttcaagggtgcctattacctgaagctggagaaccaaagtctgaagagcgtgaagtttggaagcatcaaatccgactggctaggctgctgagctggccctggctcccacaggcccttcctctccactgctagctc

SEQ ID NO: 75 - protein, 212 aa, Homo sapiens
MYRMQLLSCIALSLALVTNSCKQDIVFDGIPQIRGEIFFFKDRFIWRTVTPRDKPMGPLLVATFWPELPEKIDAVYEAPQEEKAVFFAGNEYWIYSASTLERGYPKPLTSLGLPPDVQRVDAAFNWSKNKKTYIFAGDKFWRYNEVKKKMDPGFPKLIADAWNAIPDNLDAVVDLQGGGHSYFFKGAYYLKLENQSLKSVKFGSIKSDWLGC

SEQ ID NO: 76 - DNA, 711 bp, Mus musculus
  CDS (29)..(664)
ctgagatcaccggcgaaggagggccaccatgtacaggatgcaactcctgtcttgcattgcactaagtcttgcacttgtcacgaattcgtgcaaacaggacattgtctttgatggcatcgctcagatccgtggtgagatcttcttcttcaaggaccggtttatttggcggacagtgacaccacgtgacaagcccacaggtcccttgctggtggccacattctggcctgagctcccagaaaagattgacgctgtgtatgaggccccacaggaggagaaggctgtgttcttcgcagggaatgagtactgggtctattctgccagcactctggagcgaggataccccaagccactgaccagcctggggttgccccctgatgtccagcaagtagatgctgcctttaactggagtaagaacaagaagacatacatctttgcaggagacaagttctggagatacaatgaagtgaagaagaaaatggacccgggtttccctaagctcatcgcagactcctggaatgccatccctgataacctggatgctgtcgtggacctgcagggcggtggtcatagctacttcttcaagggtgcttattacctgaagctggagaaccaaagtctcaagagcgtgaagtttggaagcatcaaatcagactggctgggctgctgagctggccctgttcccacgggccctatcatcttcatcgctagctc

SEQ ID NO: 77 - protein, 212 aa, Mus musculus
MYRMQLLSCIALSLALVTNSCKQDIVFDGIAQIRGEIFFFKDRFIWRTVTPRDKPTGPLLVATFWPELPEKIDAVYEAPQEEKAVFFAGNEYWVYSASTLERGYPKPLTSLGLPPDVQQVDAAFNWSKNKKTYIFAGDKFWRYNEVKKKMDPGFPKLIADSWNAIPDNLDAVVDLQGGGHSYFFKGAYYLKLENQSLKSVKFGSIKSDWLGC

SEQ ID NO: 78 - DNA, 363 bp, Homo sapiens
  CDS (27)..(329)
ctgagatcaccggtaggagggccatcatgagctccgcagccgggttctgcgcctcacgccccgggctgctgttcctggggttgctgctcctgccacttgtggtcgccttcgccagcgctgaagctgaagaagatggggacctgcagtgcctgtgtgtgaagaccacctcccaggtccgtcccaggcacatcaccagcctggaggtgatcaaggccggaccccactgccccactgcccaactgatagccacgctgaagaatggaaggaaaatttgcttggacctgcaagccccgctgtacaagaaaataattaagaaacttttggagagttagctactagctgcctacgtgtgtgcatttgctg

SEQ ID NO: 79 - protein, 101 aa, Homo sapiens
MSSAAGFCASRPGLLFLGLLLLPLVVAFASAEAEEDGDLQCLCVKTTSQVRPRHITSLEVIKAGPHCPTAQLIATLKNGRKICLDLQAPLYKKIIKKLLES

SEQ ID NO: 80 - DNA, 359 bp, Mus musculus
  CDS (27)..(341)
ctgagatcaccggtaggagggccatcatgagcgtcgctgcggtgtttcgaggcctccggcctagtcctgagctgctgcttctgggcctgttgtttctgccagcggtggttgctgtcaccagcgctggtcccgaagaaagcgatggagatcttagctgtgtgtgtgtgaagaccatctcctctgggatccatcttaagcacatcaccagcctggaggtgatcaaggcaggacgccactgtgcggttccccagctcatagccaccctgaagaatgggaggaaaatttgcctggaccggcaagcacccctatataagaaagtaatcaagaaaatcctggagagttaggtatcagctgcctag

SEQ ID NO: 81 - protein, 105 aa, Mus musculus
MSVAAVFRGLRPSPELLLLGLLFLPAVVAVTSAGPEESDGDLSCVCVKTISSGIHLKHITSLEVIKAGRHCAVPQLIATLKNGRKICLDRQAPLYKKVIKKILES

SEQ ID NO: 82 - DNA, 814 bp, Mus musculus
  CDS (27)..(758)
ctgagatcaccggtaggagggccagcatgctcccttctttgatccaaccgtgctcctcagggactctcctgatgctgttgatgtcaaatctcttcctgtgggagaaggtgtcctctgcacccataaatgccagtgaggctgttctcagtgatctgaaggacttgtttgataatgccactgtactttctggagagatgtctaagcttggtgtaatcatgcgcaaagaatttttcatgaactcattctcttcagagacgttcaataagattatattagatttgcacaagagtacggagaatataaccaaggctttcaacagctgccacactgttcccatcaacgttcctgaaacagttgaggatgtccgaaagacatcgtttgaagagtttttgaaaatggtgctccatatgctgctagcctggaaagagcctctgaaacatctagtgacagaactcagtgctttgccagaatgcccttataggatcctatcaaaggccgaagccattgaggcaaaaaacaaagaccttctagagtacatcataagaataatatctaaggttaatcctgcaatcaaagaaaatgaagactacccgacctggtcagatttggactccctgaagtcagctgataaagaaactcaattttttgctctttatatgttttccttctgcctgcgtattgacctagaaacagttgattttctagtcaatttcctaaaatgtctgcttctttatgatgatgtctgctactctgaattttgagatattacatgatccatcttttggaatcttcttctagtctttgcacgaattcg

SEQ ID NO: 83 - protein, 244 aa, Mus musculus
MLPSLIQPCSSGTLLMLLMSNLFLWEKVSSAPINASEAVLSDLKDLFDNATVLSGEMSKLGVIMRKEFFMNSFSSETFNKIILDLHKSTENITKAFNSCHTVPINVPETVEDVRKTSFEEFLKMVLHMLLAWKEPLKHLVTELSALPECPYRILSKAEAIEAKNKDLLEYIIRIISKVNPAIKENEDYPTWSDLDSLKSADKETQFFALYMFSFCLRIDLETVDFLVNFLKCLLLYDDVCYSEF

SEQ ID NO: 84 - DNA, 660 bp, Homo sapiens
  CDS (29)..(649)
ctgagatcaccggcgaaggagggccaccatggcaccctttgagcccctggcttctggcatcctgttgttgctgtggctgatagcccccagcagggcctgcacctgtgtcccaccccacccacagacggccttctgcaattccgacctcgtcatcagggccaagttcgtggggacaccagaagtcaaccagaccaccttataccagcgttatgagatcaacatgaccaagatgtataaagggttccaagccttaggggatgccgctgacatccggttcgtctacacccccgccatggagagtgtctgcggatacttccacaggtcccacaaccgcagcgaggagtttctcattgctggaaaactgcaggatggactcttgcacatcactacctgcagtttcgtggctccctggaacagcctgagcttagctcagcgccggggcttcaccaagacctacactgttggctgtgaggaatgcacagtgtttccctgtttatccatcccctgcaaactgcagagtggcactcattgcttgtggacggaccagctcctccaaggctctgaaaagggcttccagtcccgtcaccttgcctgcctgcctcgggagccagggctgtgcacctggcagtccctgcggtcccagatagcctgagctagctc

SEQ ID NO: 85 - protein, 207 aa, Homo sapiens
MAPFEPLASGILLLLWLIAPSRACTCVPPHPQTAFCNSDLVIRAKFVGTPEVNQTTLYQRYEINMTKMYKGFQALGDAADIRFVYTPAMESVCGYFHRSHNRSEEFLIAGKLQDGLLHITTCSFVAPWNSLSLAQRRGFTKTYTVGCEECTVFPCLSIPCKLQSGTHCLWTDQLLQGSEKGFQSRHLACLPREPGLCTWQSLRSQIA

SEQ ID NO: 86 - DNA, 645 bp, Mus musculus
  CDS (27)..(641)
ctgagatcaccggtaggagggccatcatgatggccccctttgcatctctggcatctggcatcctcttgttgctatcactgatagcttccagtaaggcctgtagctgtgccccaccccacccacagacagccttctgcaactcggacctggtcataagggctaaattcatgggttccccagaaatcaacgagaccaccttataccagcgttataagatcaagatgactaagatgctaaaaggattcaaggctgtgggaaatgccgcagatatccggtacgcctacaccccagtcatggaaagcctctgtggatatgcccacaagtcccagaaccgcagtgaagagtttctcatcacgggccgcctaaggaacggaaatttgcacatcagtgcctgcagcttcttggttccctggcgtactctgagccctgctcagcaaagagctttctcaaagacctatagtgctggctgtggggtgtgcacagtgtttccctgtttatctatcccttgcaaactggagagtgacactcactgtttgtggacggatcaggtcctcgtgggctctgaggactaccagagccgtcactttgcttgcctgccacggaatccaggcttgtgcacctggagatcccttggggcccgatgag

SEQ ID NO: 87 - protein, 205 aa, Mus musculus
MMAPFASLASGILLLLSLIASSKACSCAPPHPQTAFCNSDLVIRAKFMGSPEINETTLYQRYKIKMTKMLKGFKAVGNAADIRYAYTPVMESLCGYAHKSQNRSEEFLITGRLRNGNLHISACSFLVPWRTLSPAQQRAFSKTYSAGCGVCTVFPCLSIPCKLESDTHCLWTDQVLVGSEDYQSRHFACLPRNPGLCTWRSLGAR

SEQ ID NO: 88 - DNA, 699 bp, Homo sapiens
  CDS (29)..(688)
ctgagatcaccggcgaaggagggccaccatgggcgccgcggcccgcaccctgcggctggcgctcggcctcctgctgctggcgacgctgcttcgcccggccgacgcctgcagctgctccccggtgcacccgcaacaggcgttttgcaatgcagatgtagtgatcagggccaaagcggtcagtgagaaggaagtggactctggaaacgacatttatggcaaccctatcaagaggatccagtatgagatcaagcagataaagatgttcaaagggcctgagaaggatatagagtttatctacacggccccctcctcggcagtgtgtggggtctcgctggacgttggaggaaagaaggaatatctcattgcaggaaaggccgagggggacggcaagatgcacatcaccctctgtgacttcatcgtgccctgggacaccctgagcaccacccagaagaagagcctgaaccacaggtaccagatgggctgcgagtgcaagatcacgcgctgccccatgatcccgtgctacatctcctccccggacgagtgcctctggatggactgggtcacagagaagaacatcaacgggcaccaggccaagttcttcgcctgcatcaagagaagtgacggctcctgtgcgtggtaccgcggcgcggcgccccccaagcaggagtttctcgacatcgaggacccataagctagctc

SEQ ID NO: 89 - protein, 220 aa, Homo sapiens
MGAAARTLRLALGLLLLATLLRPADACSCSPVHPQQAFCNADVVIRAKAVSEKEVDSGNDIYGNPIKRIQYEIKQIKMFKGPEKDIEFIYTAPSSAVCGVSLDVGGKKEYLIAGKAEGDGKMHITLCDFIVPWDTLSTTQKKSLNHRYQMGCECKITRCPMIPCYISSPDECLWMDWVTEKNINGHQAKFFACIKRSDGSCAWYRGAAPPKQEFLDIEDP

SEQ ID NO: 90 - DNA, 699 bp, Homo sapiens
  CDS (27)..(659)
ctgagatcaccggtaggagggccatcatgaccccttggctcgggctcatcgtgctcctgggcagctggagcctgggggactggggcgccgaggcgtgcacatgctcgcccagccacccccaggacgccttctgcaactccgacatcgtgatccgggccaaggtggtggggaagaagctggtaaaggaggggcccttcggcacgctggtctacaccatcaagcagatgaagatgtaccgaggcttcaccaagatgccccatgtgcagtacatccacacggaagcttccgagagtctctgtggccttaagctggaggtcaacaagtaccagtacctgctgacaggtcgcgtctatgatggcaagatgtacacggggctgtgcaacttcgtggagaggtgggaccagctcaccctctcccagcgcaaggggctgaactatcggtatcacctgggttgtaactgcaagatcaagtcctgctactacctgccttgctttgtgacttccaagaacgagtgtctctggaccgacatgctctccaatttcggttaccctggctaccagtccaaacactacgcctgcatccggcagaagggcggctactgcagctggtaccgaggatgggcccccccggataaaagcatcatcaatgccacagacccctgagcgccagaccctgccccacctcacttccctcccttcg

SEQ ID NO: 91 - protein, 211 aa, Homo sapiens
MTPWLGLIVLLGSWSLGDWGAEACTCSPSHPQDAFCNSDIVIRAKVVGKKLVKEGPFGTLVYTIKQMKMYRGFTKMPHVQYIHTEASESLCGLKLEVNKYQYLLTGRVYDGKMYTGLCNFVERWDQLTLSQRKGLNYRYHLGCNCKIKSCYYLPCFVTSKNECLWTDMLSNFGYPGYQSKHYACIRQKGGYCSWYRGWAPPDKSIINATDP

SEQ ID NO: 92 - DNA, 690 bp, Mus musculus
  CDS (29)..(661)
ctgagatcaccggcgaaggagggccaccatgactccctggcttgggcttgtcgtgctcctgagctgctggagccttgggcactggggcgcggaagcgtgcacatgctctcccagccatccccaggatgccttctgcaactccgacatcgtgatccgggccaaagtggtgggaaagaagctggtgaaggaggggccctttggcactctggtctacactattaagcagatgaagatgtaccgaggcttcagtaagatgccccacgtgcagtacattcacacggaagcctctgaaagtctttgtggcctcaagctagaagtcaacaaataccagtacctgctgacagggcgcgtgtatgaaggcaagatgtacacaggactgtgcaactttgtggagaggtgggaccacctcacactgtcccagcgcaagggcctcaattaccgctaccacctgggttgcaattgcaagatcaagtcctgctactacttgccttgttttgtgacctccaagaatgagtgtctctggaccgacatgctctccaattttgggtaccctggctatcagtccaaacactacgcctgcatccggcagaagggtggctactgcagctggtaccgaggatgggctcccccagacaagagcatcagcaacgccacagacccctgaacccagaccttccccaccgctagctc

SEQ ID NO: 93 - protein, 211 aa, Mus musculus
MTPWLGLVVLLSCWSLGHWGAEACTCSPSHPQDAFCNSDIVIRAKVVGKKLVKEGPFGTLVYTIKQMKMYRGFSKMPHVQYIHTEASESLCGLKLEVNKYQYLLTGRVYEGKMYTGLCNFVERWDHLTLSQRKGLNYRYHLGCNCKIKSCYYLPCFVTSKNECLWTDMLSNFGYPGYQSKHYACIRQKGGYCSWYRGWAPPDKSISNATDP

SEQ ID NO: 94 - DNA, 754 bp, Homo sapiens
  CDS (29)..(703)
ctgagatcaccggcgaaggagggccaccatggcccctgggagccctcggcccgcgccaagctgggtgctgttgctgcggctgctggcgttgctgcggcccccggggctgggtgaggcatgcagctgcgccccggcgcaccctcagcagcacatctgccactcggcacttgtgattcgggccaaaatctccagtgagaaggtagttccggccagtgcagaccctgctgacactgaaaaaatgctccggtatgaaatcaaacagataaagatgttcaaagggtttgagaaagtcaaggatgttcagtatatctatacgccttttgactcttccctctgtggtgtgaaactagaagccaacagccagaagcagtatctcttgactggtcaggtcctcagtgatggaaaagtcttcatccatctgtgcaactacatcgagccctgggaggacctgtccttggtgcagagggaaagtctgaatcatcactaccatctgaactgtggctgccaaatcaccacctgctacacagtaccctgtaccatctcggcccctaacgagtgcctctggacagactggctgttggaacgaaagctctatggttaccaggctcagcattatgtctgtatgaagcatgttgacggcacctgcagctggtaccggggccacctgcctctcaggaaggagtttgttgacatcgttcagccctagtagggaccagtgaccatcacatcccttcaagagtcctgaagctagctc

SEQ ID NO: 95 - protein, 225 aa, Homo sapiens
MAPGSPRPAPSWVLLLRLLALLRPPGLGEACSCAPAHPQQHICHSALVIRAKISSEKVVPASADPADTEKMLRYEIKQIKMFKGFEKVKDVQYIYTPFDSSLCGVKLEANSQKQYLLTGQVLSDGKVFIHLCNYIEPWEDLSLVQRESLNHHYHLNCGCQITTCYTVPCTISAPNECLWTDWLLERKLYGYQAQHYVCMKHVDGTCSWYRGHLPLRKEFVDIVQP

SEQ ID NO: 96 - DNA, 654 bp, Homo sapiens
  CDS (29)..(574)
ctgagatcaccggcgaaggagggccaccatgggagatgaggagaagcggaacagggccatcacggcccgcaggcagcacctgaagagtgtgatgctgcagatagcggccacggagctggagaaggaggagagccgccgtgaggcagagaagcagaactacctggcggagcactgcccgccgctgcatatcccgggctccatgtctgaagtgcaggagctctgcaaacagctgcacgccaagatcgatgcggctgaagaggagaagtacgacatggaggtgagggtgcagaagaccagcaaggagctggaggacatgaaccagaagctatttgatctgcggggcaagttcaagcggcccccactgcggagggtgcgcatgtcgaccgatgccatgctcaaggccctgctgggctcgaagcacaaggtgtgcatggacctgagggccaacctgaagcaggtcaagaaggaggacacagagaaggagcgggacctgcgagacgtgggtgactggaggaagaacatcgaggagaagtctggcatggagggccggaagaagatgtttgagtccgagtcctaggccactcgctgcccctacgcctgccccggtgcccggctcccagcagaacatactagggagatgcacccagctagctc

SEQ ID NO: 97 - protein, 182 aa, Homo sapiens
MGDEEKRNRAITARRQHLKSVMLQIAATELEKEESRREAEKQNYLAEHCPPLHIPGSMSEVQELCKQLHAKIDAAEEEKYDMEVRVQKTSKELEDMNQKLFDLRGKFKRPPLRRVRMSTDAMLKALLGSKHKVCMDLRANLKQVKKEDTEKERDLRDVGDWRKNIEEKSGMEGRKKMFESES

SEQ ID NO: 98 - DNA, 608 bp, Mus musculus
  CDS (29)..(574)
ctgagatcaccggcgaaggagggccaccatgggagatgaggagaagcgcaacagggccatcacggcccggagacagcacctgaagagtgtgatgctccagatagcggccacagagctggagaaagaggaaagccgccgagaatctgagaaggagaactacctgtcagaacactgcccgccactgcacatcccaggctccatgtctgaagtgcaggaactctgcaaacaactgcatgcgaagatcgacgtggctgaagaggagaaatatgacatggaggtgaaggtgcagaacagcagcaaggagctggaagacatgaaccagaagctatttgacctgaggggcaagttcaagaggcccccacttcggagggtgcgtatgtctgccgacgccatgctgaaggcgctgctgggctctaagcacaaggtgtgcatggacctgagggccaacctgaagcaggtcaagaaggaagacactgagaaggaacgggacctgcgtgacgtgggtgactggaggaagaatattgaggagaagtctggcatggagggccggaagaaaatgttcgagtctgagtcctaactgcccacttccccagtaccaccgctagctc

SEQ ID NO: 99 - protein, 182 aa, Mus musculus
MGDEEKRNRAITARRQHLKSVMLQIAATELEKEESRRESEKENYLSEHCPPLHIPGSMSEVQELCKQLHAKIDVAEEEKYDMEVKVQNSSKELEDMNQKLFDLRGKFKRPPLRRVRMSADAMLKALLGSKHKVCMDLRANLKQVKKEDTEKERDLRDVGDWRKNIEEKSGMEGRKKMFESES

SEQ ID NO: 100 - DNA, 1294 bp, Homo sapiens
  CDS (29)..(1222)
ctgagatcaccggcgaaggagggccaccatgtacaggatgcaactcctgtcttgcattgcactaagtcttgcacttgtcacgaattctagtgcaaaaggcatagactacgataagctcattgttcggtttggaagtagtaaaattgacaaagagctaataaaccgaatagagagagccaccggccaaagaccacaccacttcctgcgcagaggcatcttcttctcacacagagatatgaatcaggttcttgatgcctatgaaaataagaagccattttatctgtacacgggccggggcccctcttctgaagcaatgcatgtaggtcacctcattccatttattttcacaaagtggctccaggatgtatttaacgtgcccttggtcatccagatgacggatgacgagaagtatctgtggaaggacctgaccctggaccaggcctatagctatgctgtggagaatgccaaggacatcatcgcctgtggctttgacatcaacaagactttcatattctctgacctggactacatggggatgagctcaggtttctacaaaaatgtggtgaagattcaaaagcatgttaccttcaaccaagtgaaaggcattttcggcttcactgacagcgactgcattgggaagatcagttttcctgccatccaggctgctccctccttcagcaactcattcccacagatcttccgagacaggacggatatccagtgccttatcccatgtgccattgaccaggatccttactttagaatgacaagggacgtcgcccccaggatcggctatcctaaaccagccctgctgcactccaccttcttcccagccctgcagggcgcccagaccaaaatgagtgccagcgaccccaactcctccatcttcctcaccgacacggccaagcagatcaaaaccaaggtcaataagcatgcgttttctggagggagagacaccatcgaggagcacaggcagtttgggggcaactgtgatgtggacgtgtctttcatgtacctgaccttcttcctcgaggacgacgacaagctcgagcagatcaggaaggattacaccagcggagccatgctcaccggtgagctcaagaaggcactcatagaggttctgcagcccttgatcgcagagcaccaggcccggcgcaaggaggtcacggatgagatagtgaaagagttcatgactccccggaagctgtccttcgactttcagtagcactcgttttacatatgcttataaaagaagtgatgtatcagtaatgtatcaataatcccagcccagtcg

SEQ ID NO: 101 - protein, 398 aa, Homo sapiens
MYRMQLLSCIALSLALVTNSSAKGIDYDKLIVRFGSSKIDKELINRIERATGQRPHHFLRRGIFFSHRDMNQVLDAYENKKPFYLYTGRGPSSEAMHVGHLIPFIFTKWLQDVFNVPLVIQMTDDEKYLWKDLTLDQAYSYAVENAKDIIACGFDINKTFIFSDLDYMGMSSGFYKNVVKIQKHVTFNQVKGIFGFTDSDCIGKISFPAIQAAPSFSNSFPQIFRDRTDIQCLIPCAIDQDPYFRMTRDVAPRIGYPKPALLHSTFFPALQGAQTKMSASDPNSSIFLTDTAKQIKTKVNKHAFSGGRDTIEEHRQFGGNCDVDVSFMYLTFFLEDDDKLEQIRKDYTSGAMLTGELKKALIEVLQPLIAEHQARRKEVTDEIVKEFMTPRKLSFDFQ

SEQ ID NO: 102 - DNA, 3603 bp, Homo sapiens
  CDS (27)..(3539)
ctgagatcaccggtaggagggccatcatgatcgggctggcctggggactaggcgtcctgttcctgatgcatgtgtgtggcaccaaccgcattccagagtctggcggagacaacagcgtgtttgacatctttgaactcaccggggccgcccgcaaggggtctgggcgccgactggtgaagggccccgacccttccagcccagctttccgcatcgaggatgccaacctgatcccccctgtgcctgatgacaagttccaagacctggtggatgctgtgcgggcagaaaagggtttcctccttctggcatccctgaggcagatgaagaagacccggggcacgctgctggccctggagcggaaagaccactctggccaggtcttcagcgtggtgtccaatggcaaggcgggcaccctggacctcagcctgaccgtccaaggaaagcagcacgtggtgtctgtggaagaagctctcctggcaaccggccagtggaagagcatcaccctgtttgtgcaggaagacagggcccagctgtacatcgactgtgaaaagatggagaatgctgagttggacgtccccatccaaagcgtcttcaccagagacctggccagcatcgccagactccgcatcgcaaaggggggcgtcaatgacaatttccagggggtgctgcagaatgtgaggtttgtctttggaaccacaccagaagacatcctcaggaacaaaggctgctccagctctaccagtgtcctcctcacccttgacaacaacgtggtgaatggttccagccctgccatccgcactaactacattggccacaagacaaaggacttgcaagccatctgcggcatctcctgtgatgagctgtccagcatggtcctggaactcaggggcctgcgcaccattgtgaccacgctgcaggacagcatccgcaaagtgactgaagagaacaaagagttggccaatgagctgaggcggcctcccctatgctatcacaacggagttcagtacagaaataacgaggaatggactgttgatagctgcactgagtgtcactgtcagaactcagttaccatctgcaaaaaggtgtcctgccccatcatgccctgctccaatgccacagttcctgatggagaatgctgtcctcgctgttggcccagcgactctgcggacgatggctggtctccatggtccgagtggacctcctgttctacgagctgtggcaatggaattcagcagcgcggccgctcctgcgatagcctcaacaaccgatgtgagggctcctcggtccagacacggacctgccacattcaggagtgtgacaagagatttaaacaggatggtggctggagccactggtccccgtggtcatcttgttctgtgacatgtggtgatggtgtgatcacaaggatccggctctgcaactctcccagcccccagatgaacgggaaaccctgtgaaggcgaagcgcgggagaccaaagcctgcaagaaagacgcctgccccatcaatggaggctggggtccttggtcaccatgggacatctgttctgtcacctgtggaggaggggtacagaaacgtagtcgtctctgcaacaaccccacaccccagtttggaggcaaggactgcgttggtgatgtaacagaaaaccagatctgcaacaagcaggactgtccaattgatggatgcctgtccaatccctgctttgccggcgtgaagtgtactagctaccctgatggcagctggaaatgtggtgcttgtccccctggttacagtggaaatggcatccagtgcacagatgttgatgagtgcaaagaagtgcctgatgcctgcttcaaccacaatggagagcaccggtgtgagaacacggaccccggctacaactgcctgccctgccccccacgcttcaccggctcacagcccttcggccagggtgtcgaacatgccacggccaacaaacaggtgtgcaagccccgtaacccctgcacggatgggacccacgactgcaacaagaacgccaagtgcaactacctgggccactatagcgaccccatgtaccgctgcgagtgcaagcctggctacgctggcaatggcatcatctgcggggaggacacagacctggatggctggcccaatgagaacctggtgtgcgtggccaatgcgacttaccactgcaaaaaggataattgccccaaccttcccaactcagggcaggaagactatgacaaggatggaattggtgatgcctgtgatgatgacgatgacaatgataaaattccagatgacagggacaactgtccattccattacaacccagctcagtatgactatgacagagatgatgtgggagaccgctgtgacaactgtccctacaaccacaacccagatcaggcagacacagacaacaatggggaaggagacgcctgtgctgcagacattgatggagacggtatcctcaatgaacgggacaactgccagtacgtctacaatgtggaccagagagacactgatatggatggggttggagatcagtgtgacaattgccccttggaacacaatccggatcagctggactctgactcagaccgcattggagatacctgtgacaacaatcaggatattgatgaagatggccaccagaacaatctggacaactgtccctatgtgcccaatgccaaccaggctgaccatgacaaagatggcaagggagatgcctgtgaccacgatgatgacaacgatggcattcctgatgacaaggacaactgcagactcgtgcccaatcccgaccagaaggactctgacggcgatggtcgaggtgatgcctgcaaagatgattttgaccatgacagtgtgccagacatcgatgacatctgtcctgagaatgttgacatcagtgagaccgatttccgccgattccagatgattcctctggaccccaaagggacatcccaaaatgaccctaactgggttgtacgccatcagggtaaagaactcgtccagactgtcaactgtgatcctggactcgctgtaggttatgatgagtttaatgctgtggacttcagtggcaccttcttcatcaacaccgaaagggacgatgactatgctggatttgtctttggctaccagtccagcagccgcttttatgttgtgatgtggaagcaagtcacccagtcctactgggacaccaaccccacgagggctcagggatactcgggcctttctgtgaaagttgtaaactccaccacagggcctggcgagcacctgcggaacgccctgtggcacacaggaaacacccctggccaggtgcgcaccctgtggcatgaccctcgtcacataggctggaaagatttcaccgcctacagatggcgtctcagccacaggccaaagacgggtttcattagagtggtgatgtatgaagggaagaaaatcatggctgactcaggacccatctatgataaaacctatgctggtggtagactagggttgtttgtcttctctcaagaaatggtgttcttctctgacctgaaatacgaatgtagagatccctaatcatcaaattgttgattgaaagactgatcataaaccaatgctggtattgcaccttctggag

SEQ ID NO: 103 - protein, 1171 aa, Homo sapiens
MIGLAWGLGVLFLMHVCGTNRIPESGGDNSVFDIFELTGAARKGSGRRLVKGPDPSSPAFRIEDANLIPPVPDDKFQDLVDAVRAEKGFLLLASLRQMKKTRGTLLALERKDHSGQVFSVVSNGKAGTLDLSLTVQGKQHVVSVEEALLATGQWKSITLFVQEDRAQLYIDCEKMENAELDVPIQSVFTRDLASIARLRIAKGGVNDNFQGVLQNVRFVFGTTPEDILRNKGCSSSTSVLLTLDNNVVNGSSPAIRTNYIGHKTKDLQAICGISCDELSSMVLELRGLRTIVTTLQDSIRKVTEENKELANELRRPPLCYHNGVQYRNNEEWTVDSCTECHCQNSVTICKKVSCPIMPCSNATVPDGECCPRCWPSDSADDGWSPWSEWTSCSTSCGNGIQQRGRSCDSLNNRCEGSSVQTRTCHIQECDKRFKQDGGWSHWSPWSSCSVTCGDGVITRIRLCNSPSPQMNGKPCEGEARETKACKKDACPINGGWGPWSPWDICSVTCGGGVQKRSRLCNNPTPQFGGKDCVGDVTENQICNKQDCPIDGCLSNPCFAGVKCTSYPDGSWKCGACPPGYSGNGIQCTDVDECKEVPDACFNHNGEHRCENTDPGYNCLPCPPRFTGSQPFGQGVEHATANKQVCKPRNPCTDGTHDCNKNAKCNYLGHYSDPMYRCECKPGYAGNGIICGEDTDLDGWPNENLVCVANATYHCKKDNCPNLPNSGQEDYDKDGIGDACDDDDDNDKIPDDRDNCPFHYNPAQYDYDRDDVGDRCDNCPYNHNPDQADTDNNGEGDACAADIDGDGILNERDNCQYVYNVDQRDTDMDGVGDQCDNCPLEHNPDQLDSDSDRIGDTCDNNQDIDEDGHQNNLDNCPYVPNANQADHDKDGKGDACDHDDDNDGIPDDKDNCRLVPNPDQKDSDGDGRGDACKDDFDHDSVPDIDDICPENVDISETDFRRFQMIPLDPKGTSQNDPNWVVRHQGKELVQTVNCDPGLAVGYDEFNAVDFSGTFFINTERDDDYAGFVFGYQSSSRFYVVMWKQVTQSYWDTNPTRAQGYSGLSVKVVNSTTGPGEHLRNALWHTGNTPGQVRTLWHDPRHIGWKDFTAYRWRLSHRPKTGFIRVVMYEGKKIMADSGPIYDKTYAGGRLGLFVFSQEMVFFSDLKYECRDP

SEQ ID NO: 104 - DNA, 827 bp, Homo sapiens
  CDS (29)..(823)
ctgagatcaccggcgaaggagggccaccatgtacaggatgcaactcctgtcttgcattgcactaagtcttgcacttgtcacgaattctccaggtttgaaaggaaaacgtggagacagtggatcacctgcaacctggacaacgagaggctttgtcttcacccgacacagtcaaaccacagcaattccttcatgtccagaggggacagtgccactctacagtgggttttcttttctttttgtacaaggaaatcaacgagcccacggacaagaccttggaactcttggcagctgcctgcagcgatttaccacaatgccattcttattctgcaatgtcaatgatgtatgtaattttgcatctcgaaatgattattcatactggctgtcaacaccagctctgatgccaatgaacatggctcccattactggcagagcccttgagccttatataagcagatgcactgtttgtgaaggtcctgcgatcgccatagccgttcacagccaaaccactgacattcctccatgtcctcacggctggatttctctctggaaaggattttcattcatcatgttcacaagtgcaggttctgagggcaccgggcaagcactggcctcccctggctcctgcctggaagagttccgagccagcccatttctagaatgtcatggaagaggaacgtgcaactactattcaaattcctacagtttctggctggcttcattaaacccagaaagaatgttcagaaagcctattccatcaactgtgaaagctggggaattagaaaaaataataagtcgctgtcaggtgtgcatgaagaaaagacactgag

SEQ ID NO: 105 - protein, 265 aa, Homo sapiens
MYRMQLLSCIALSLALVTNSPGLKGKRGDSGSPATWTTRGFVFTRHSQTTAIPSCPEGTVPLYSGFSFLFVQGNQRAHGQDLGTLGSCLQRFTTMPFLFCNVNDVCNFASRNDYSYWLSTPALMPMNMAPITGRALEPYISRCTVCEGPAIAIAVHSQTTDIPPCPHGWISLWKGFSFIMFTSAGSEGTGQALASPGSCLEEFRASPFLECHGRGTCNYYSNSYSFWLASLNPERMFRKPIPSTVKAGELEKIISRCQVCMKKRH

SEQ ID NO: 106 - DNA, 19 bp, Artificial Sequence
  VEGF 121 target sequence
tcatcacgaagtggtgaag

SEQ ID NO: 107 - RNA, 21 nt, Artificial Sequence
  VEGF siRNA sense strand
ucaucacgaaguggugaaguu

SEQ ID NO: 108 - RNA, 21 nt, Artificial Sequence
  VEGF siRNA antisense strand
cuucaccacuucgugaugauu

SEQ ID NO: 109 - DNA, 21 bp, Artificial Sequence
  VEGF siRNA sense strand
ucaucacgaaguggugaagtt

SEQ ID NO: 110 - DNA, 21 bp, Artificial Sequence
  VEGF siRNA antisense strand
cuucaccacuucgugaugatt

SEQ ID NO: 111 - DNA, 19 bp, Artificial Sequence
  VEGF target sequence
gttcatggatgtctatcag

SEQ ID NO: 112 - DNA, 19 bp, Artificial Sequence
  VEGF target sequence
tccctgtgggccttgctca

SEQ ID NO: 113 - DNA, 19 bp, Artificial Sequence
  VEGF target sequence
tcgagaccctggtggacat

SEQ ID NO: 114 - DNA, 19 bp, Artificial Sequence
  VEGF target sequence
gcatttgtttgtacaagat

SEQ ID NO: 115 - DNA, 19 bp, Artificial Sequence
  VEGF target sequence
tgacgagggcctggagtgt

SEQ ID NO: 116 - DNA, 19 bp, Artificial Sequence
  VEGF target sequence
gatccgcagacgtgtaaat

SEQ ID NO: 117 - DNA, 19 bp, Artificial Sequence
  VEGF target sequence
tgacgagggcctggagtgt

SEQ ID NO: 118 - DNA, 19 bp, Artificial Sequence
  VEGF target sequence
atgttcctgcaaaaacaca

SEQ ID NO: 119 - DNA, 19 bp, Artificial Sequence
  VEGF target sequence
catcaccatgcagattatg

SEQ ID NO: 120 - DNA, 19 bp, Artificial Sequence
  VEGF target sequence
tgttcctgcaaaaacacag

SEQ ID NO: 121 - DNA, 19 bp, Artificial Sequence
  VEGF target sequence
acctcaccaaggccagcac

SEQ ID NO: 122 - DNA, 19 bp, Artificial Sequence
  VEGF target sequence
aaacacagactcgcgttgc

SEQ ID NO: 123 - DNA, 19 bp, Artificial Sequence
  VEGF target sequence
ggccagcacataggagaga

SEQ ID NO: 124 - DNA, 19 bp, Artificial Sequence
  VEGF target sequence
aacacagactcgcgttgca

SEQ ID NO: 125 - DNA, 19 bp, Artificial Sequence
  VEGF target sequence
caaatgtgaatgcagacca

SEQ ID NO: 126 - DNA, 19 bp, Artificial Sequence
  VEGF target sequence
acacagactcgcgttgcaa

SEQ ID NO: 127 - DNA, 19 bp, Artificial Sequence
  VEGF target sequence
atgtgaatgcagaccaaag

SEQ ID NO: 128 - DNA, 19 bp, Artificial Sequence
  VEGF target sequence
cacagactcgcgttgcaag

SEQ ID NO: 129 - DNA, 19 bp, Artificial Sequence
  VEGF target sequence
tgcagaccaaagaaagata

SEQ ID NO: 130 - DNA, 19 bp, Artificial Sequence
  VEGF target sequence
ggcgaggcagcttgagtta

SEQ ID NO: 131 - DNA, 19 bp, Artificial Sequence
  VEGF target sequence
agaaagatagagcaagaca

SEQ ID NO: 132 - DNA, 19 bp, Artificial Sequence
  VEGF target sequence
acgaacgtacttgcagatg

SEQ ID NO: 133 - DNA, 19 bp, Artificial Sequence
  VEGF target sequence
gaaagatagagcaagacaa

SEQ ID NO: 134 - DNA, 19 bp, Artificial Sequence
  VEGF target sequence
cgaacgtacttgcagatgt

SEQ ID NO: 135 - DNA, 19 bp, Artificial Sequence
  VEGF target sequence
gatagagcaagacaagaaa

SEQ ID NO: 136 - DNA, 19 bp, Artificial Sequence
  VEGF target sequence
cgtacttgcagatgtgaca

SEQ ID NO: 137 - DNA, 19 bp, Artificial Sequence
  VEGF target sequence
gacaagaaaatccctgtgg

SEQ ID NO: 138 - DNA, 19 bp, Artificial Sequence
  VEGF target sequence
gtggtcccaggctgcaccc

SEQ ID NO: 139 - DNA, 19 bp, Artificial Sequence
  VEGF target sequence
gaaaatccctgtgggcctt

SEQ ID NO: 140 - DNA, 19 bp, Artificial Sequence
  VEGF target sequence
ggaggagggcagaatcatc

SEQ ID NO: 141 - DNA, 19 bp, Artificial Sequence
  VEGF target sequence
aatccctgtgggccttgct

SEQ ID NO: 142 - DNA, 19 bp, Artificial Sequence
  VEGF target sequence
gtggtgaagttcatggatg

SEQ ID NO: 143 - DNA, 21 bp, Artificial Sequence
  VEGF target sequence
aatcatcacgaagtggtgaag

SEQ ID NO: 144 - DNA, 23 bp, Artificial Sequence
  VEGF target sequence
aagcatttgtttgtacaagatcc

SEQ ID NO: 145 - DNA, 21 bp, Artificial Sequence
  VEGF target sequence
aagttcatggatgtctatcag

SEQ ID NO: 146 - DNA, 23 bp, Artificial Sequence
  VEGF target sequence
aagatccgcagacgtgtaaatgt

SEQ ID NO: 147 - DNA, 21 bp, Artificial Sequence
  VEGF target sequence
aatcgagaccctggtggacat

SEQ ID NO: 148 - DNA, 23 bp, Artificial Sequence
  VEGF target sequence
aaatgttcctgcaaaaacacaga

SEQ ID NO: 149 - DNA, 21 bp, Artificial Sequence
  VEGF target sequence
aatgacgagggcctggagtgt

SEQ ID NO: 150 - DNA, 23 bp, Artificial Sequence
  VEGF target sequence
aatgttcctgcaaaaacacagac

SEQ ID NO: 151 - DNA, 21 bp, Artificial Sequence
  VEGF target sequence
aacatcaccatgcagattatg

SEQ ID NO: 152 - DNA, 23 bp, Artificial Sequence
  VEGF target sequence
aaaaacacagactcgcgttgcaa

SEQ ID NO: 153 - DNA, 21 bp, Artificial Sequence
  VEGF target sequence
aaacctcaccaaggccagcac

SEQ ID NO: 154 - DNA, 23 bp, Artificial Sequence
  VEGF target sequence
aaaacacagactcgcgttgcaag

SEQ ID NO: 155 - DNA, 21 bp, Artificial Sequence
  VEGF target sequence
aaggccagcacataggagaga

SEQ ID NO: 156 - DNA, 23 bp, Artificial Sequence
  VEGF target sequence
aaacacagactcgcgttgcaagg

SEQ ID NO: 157 - DNA, 21 bp, Artificial Sequence
  VEGF target sequence
aacaaatgtgaatgcagacca

SEQ ID NO: 158 - DNA, 23 bp, Artificial Sequence
  VEGF target sequence
aacacagactcgcgttgcaaggc

SEQ ID NO: 159 - DNA, 21 bp, Artificial Sequence
  VEGF target sequence
aaatgtgaatgcagaccaaag

SEQ ID NO: 160 - DNA, 23 bp, Artificial Sequence
  VEGF target sequence
aaggcgaggcagcttgagttaaa

SEQ ID NO: 161 - DNA, 21 bp, Artificial Sequence
  VEGF target sequence
aatgcagaccaaagaaagata

SEQ ID NO: 162 - DNA, 23 bp, Artificial Sequence
  VEGF target sequence
aaacgaacgtacttgcagatgtg

SEQ ID NO: 163 - DNA, 21 bp, Artificial Sequence
  VEGF target sequence
aaagaaagatagagcaagaca

SEQ ID NO: 164 - DNA, 23 bp, Artificial Sequence
  VEGF target sequence
aacgaacgtacttgcagatgtga

SEQ ID NO: 165 - DNA, 21 bp, Artificial Sequence
  VEGF target sequence
aagaaagatagagcaagacaa

SEQ ID NO: 166 - DNA, 23 bp, Artificial Sequence
  VEGF target sequence
aagtggtcccaggctgcacccat

SEQ ID NO: 167 - DNA, 23 bp, Artificial Sequence
  VEGF target sequence
aagatagagcaagacaagaaaat

SEQ ID NO: 168 - DNA, 23 bp, Artificial Sequence
  VEGF target sequence
aaggaggagggcagaatcatcac

SEQ ID NO: 169 - DNA, 23 bp, Artificial Sequence
  VEGF target sequence
aagacaagaaaatccctgtgggc

SEQ ID NO: 170 - DNA, 23 bp, Artificial Sequence
  VEGF target sequence
aagtggtgaagttcatggatgtc

SEQ ID NO: 171 - DNA, 23 bp, Artificial Sequence
  VEGF target sequence
aagaaaatccctgtgggccttgc

SEQ ID NO: 172 - DNA, 23 bp, Artificial Sequence
  VEGF target sequence
aaaatccctgtgggccttgctca

SEQ ID NO: 173 - DNA, 23 bp, Artificial Sequence
  VEGF target sequence
aatccctgtgggccttgctcaga

SEQ ID NO: 174 - DNA, 21 bp, Artificial Sequence
  VEGF target sequence
ggcagaatcatcacgaagtgg

SEQ ID NO: 175 - DNA, 21 bp, Artificial Sequence
  VEGF target sequence
cctggtggacatcttccagga

SEQ ID NO: 176 - DNA, 21 bp, Artificial Sequence
  VEGF target sequence
cacacactcgcgttgcaaggc

SEQ ID NO: 177 - DNA, 21 bp, Artificial Sequence
  VEGF target sequence
gagatcgagtacatcttcaag

SEQ ID NO: 178 - DNA, 21 bp, Artificial Sequence
  VEGF target sequence
tcaccatgcagattatgcgga

SEQ ID NO: 179 - DNA, 21 bp, Artificial Sequence
  VEGF target sequence
tggagtgtgtgcccactgagg

SEQ ID NO: 180 - DNA, 21 bp, Artificial Sequence
  VEGF target sequence
tagagcaagacaagaaaatcc

SEQ ID NO: 181 - DNA, 21 bp, Artificial Sequence
  VEGF target sequence
gagcttcctacagcacaacaa

SEQ ID NO: 182 - DNA, 21 bp, Artificial Sequence
  VEGF target sequence
ccgcagacgtgtaaatgttcc

SEQ ID NO: 183 - DNA, 21 bp, Artificial Sequence
  VEGF target sequence
ttgctcagagcggagaaagca

SEQ ID NO: 184 - DNA, 21 bp, Artificial Sequence
  HIF-1 alpha target sequence
aactaactggacacagtgtgt

SEQ ID NO: 185 - DNA, 17 bp, Artificial Sequence
  HIF-1 alpha target sequence
cgacaagaaaaagataa

SEQ ID NO: 186 - DNA, 17 bp, Artificial Sequence
  HIF-1 alpha target sequence
aaagataagttctgaac

SEQ ID NO: 187 - DNA, 17 bp, Artificial Sequence
  HIF-1 alpha target sequence
agataagttctgaacgt

SEQ ID NO: 188 - DNA, 17 bp, Artificial Sequence
  HIF-1 alpha target sequence
gttctgaacgtcgaaaa

SEQ ID NO: 189 - DNA, 17 bp, Artificial Sequence
  HIF-1 alpha target sequence
aagaaaagtctcgagat

SEQ ID NO: 190 - DNA, 17 bp, Artificial Sequence
  HIF-1 alpha target sequence
gaaaagtctcgagatgc

SEQ ID NO: 191 - DNA, 17 bp, Artificial Sequence
  HIF-1 alpha target sequence
agtctcgagatgcagcc

SEQ ID NO: 192 - DNA, 17 bp, Artificial Sequence
  HIF-1 alpha target sequence
gtaaagaatctgaagtt

SEQ ID NO: 193 - DNA, 17 bp, Artificial Sequence
  HIF-1 alpha target sequence
gaatctgaagtttttta

SEQ ID NO: 194 - DNA, 17 bp, Artificial Sequence
  HIF-1 alpha target sequence
gttttttatgagcttgc

SEQ ID NO: 195 - DNA, 17 bp, Artificial Sequence
  HIF-1 alpha target sequence
ggcctctgtgatgaggc

SEQ ID NO: 196 - DNA, 17 bp, Artificial Sequence
  HIF-1 alpha target sequence
cttctggatgctggtga

SEQ ID NO: 197 - DNA, 17 bp, Artificial Sequence
  HIF-1 alpha target sequence
agcacagatgaattgct

SEQ ID NO: 198 - DNA, 21 bp, Artificial Sequence
  HIF-1 alpha target sequence
aaatgcttacacacagaaatg

SEQ ID NO: 199 - DNA, 17 bp, Artificial Sequence
  HIF-1 alpha target sequence
gaaaaagataagttctg

SEQ ID NO: 200 - DNA, 21 bp, Artificial Sequence
  HIF-1 target sequence
aagttttttatgagcttgctc

SEQ ID NO: 201 - DNA, 21 bp, Artificial Sequence
  HIF-1 target sequence
aagttttttatgagcttgctc

SEQ ID NO: 202 - DNA, 21 bp, Artificial Sequence
  HIF-1 target sequence
aaggcctctgtgatgaggctt

SEQ ID NO: 203 - DNA, 21 bp, Artificial Sequence
  HIF-1 target sequence
aaacttctggatgctggtgat

SEQ ID NO: 204 - DNA, 21 bp, Artificial Sequence
  HIF-1 target sequence
aacttctggatgctggtgatt

SEQ ID NO: 205 - DNA, 21 bp, Artificial Sequence
  HIF-1 target sequence
aagatgacatgaaagcacaga

SEQ ID NO: 206 - DNA, 21 bp, Artificial Sequence
  HIF-1 target sequence
aaagcacagatgaattgcttt

SEQ ID NO: 207 - DNA, 21 bp, Artificial Sequence
  HIF-1 target sequence
aagcacagatgaattgctttt

SEQ ID NO: 208 - DNA, 21 bp, Artificial Sequence
  HIF-1 target sequence
aattgcttttatttgaaagcc

SEQ ID NO: 209 - DNA, 21 bp, Artificial Sequence
  HIF-1 target sequence
aaagccttggatggttttgtt

SEQ ID NO: 210 - DNA, 21 bp, Artificial Sequence
  HIF-1 target sequence
aagccttggatggttttgtta

SEQ ID NO: 211 - DNA, 21 bp, Artificial Sequence
  HIF-1 target sequence
aatgtgaacaaatacatggga

SEQ ID NO: 212 - DNA, 21 bp, Artificial Sequence
  HIF-1 target sequence
aacaaatacatgggattaact

SEQ ID NO: 213 - DNA, 21 bp, Artificial Sequence
  HIF-1 target sequence
aaatacatgggattaactcag

SEQ ID NO: 214 - DNA, 21 bp, Artificial Sequence
  HIF-1 target sequence
aaatacatgggattaactcag

SEQ ID NO: 215 - DNA, 21 bp, Artificial Sequence
  HIF-1 target sequence
aactcagtttgaactaactgg

SEQ ID NO: 216 - DNA, 21 bp, Artificial Sequence
  HIF-1 target sequence
aactaactggacacagtgtgt

SEQ ID NO: 217 - DNA, 21 bp, Artificial Sequence
  HIF-1 target sequence
aactggacacagtgtgtttga

SEQ ID NO: 218 - DNA, 21 bp, Artificial Sequence
  HIF-1 target sequence
aaatgagagaaatgcttacac

SEQ ID NO: 219 - DNA, 21 bp, Artificial Sequence
  HIF-1 target sequence
aatgagagaaatgcttacaca

SEQ ID NO: 220 - DNA, 21 bp, Artificial Sequence
  HIF-1 target sequence
aaatgcttacacacagaaatg

SEQ ID NO: 221 - DNA, 21 bp, Artificial Sequence
  HIF-1 target sequence
aatgcttacacacagaaatgg

SEQ ID NO: 222 - DNA, 21 bp, Artificial Sequence
  HIF-1 target sequence
aaatggccttgtgaaaaaggg

SEQ ID NO: 223 - DNA, 21 bp, Artificial Sequence
  HIF-1 target sequence
aatggccttgtgaaaaagggt

SEQ ID NO: 224 - DNA, 21 bp, Artificial Sequence
  HIF-1 target sequence
aaaaagggtaaagaacaaaac

SEQ ID NO: 225 - DNA, 21 bp, Artificial Sequence
  HIF-1 target sequence
aaaagggtaaagaacaaaaca

SEQ ID NO: 226 - DNA, 21 bp, Artificial Sequence
  HIF-1 target sequence
aaagggtaaagaacaaaacac

SEQ ID NO: 227 - DNA, 21 bp, Artificial Sequence
  HIF-1 target sequence
aagggtaaagaacaaaacaca

SEQ ID NO: 228 - DNA, 21 bp, Artificial Sequence
  HIF-1 target sequence
aaagaacaaaacacacagcga

SEQ ID NO: 229 - DNA, 21 bp, Artificial Sequence
  HIF-1 target sequence
aagaacaaaacacacagcgaa

SEQ ID NO: 230 - DNA, 21 bp, Artificial Sequence
  HIF-1 target sequence
aacaaaacacacagcgaagct

SEQ ID NO: 231 - DNA, 21 bp, Artificial Sequence
  HIF-1 target sequence
aacaaaacacacagcgaagct

SEQ ID NO: 232 - DNA, 21 bp, Artificial Sequence
  HIF-1 target sequence
aaacacacagcgaagcttttt

SEQ ID NO: 233 - DNA, 21 bp, Artificial Sequence
  HIF-1 target sequence
aacacacagcgaagctttttt

SEQ ID NO: 234 - DNA, 21 bp, Artificial Sequence
  HIF-1 target sequence
aagcttttttctcagaatgaa

SEQ ID NO: 235 - DNA, 21 bp, Artificial Sequence
  HIF-1 target sequence
aatgaagtgtaccctaactag

SEQ ID NO: 236 - DNA, 21 bp, Artificial Sequence
  HIF-1 target sequence
aagtgtaccctaactagccga

SEQ ID NO: 237 - DNA, 21 bp, Artificial Sequence
  HIF-1 target sequence
aactagccgaggaagaactat

SEQ ID NO: 238 - DNA, 21 bp, Artificial Sequence
  HIF-1 target sequence
aagaactatgaacataaagtc

SEQ ID NO: 239 - DNA, 21 bp, Artificial Sequence
  HIF-1 target sequence
aactatgaacataaagtctgc

SEQ ID NO: 240 - DNA, 21 bp, Artificial Sequence
  HIF-1 target sequence
aacataaagtctgcaacatgg

SEQ ID NO: 241 - DNA, 21 bp, Artificial Sequence
  HIF-1 target sequence
aaagtctgcaacatggaaggt

SEQ ID NO: 242 - DNA, 21 bp, Artificial Sequence
  HIF-1 target sequence
aagtctgcaacatggaaggta

SEQ ID NO: 243 - DNA, 21 bp, Artificial Sequence
  HIF-1 target sequence
aacatggaaggtattgcactg

SEQ ID NO: 244 - DNA, 21 bp, Artificial Sequence
  HIF-1 target sequence
aaggtattgcactgcacaggc

SEQ ID NO: 245 - DNA, 21 bp, Artificial Sequence
  HIF-1 target sequence
aacagtaaccaacctcagtgt

SEQ ID NO: 246 - DNA, 21 bp, Artificial Sequence
  HIF-1 target sequence
aaccaacctcagtgtgggtat

SEQ ID NO: 247 - DNA, 21 bp, Artificial Sequence
  HIF-1 target sequence
aacctcagtgtgggtataaga

SEQ ID NO: 248 - DNA, 21 bp, Artificial Sequence
  HIF-1 target sequence
aagaaaccacctatgacctgc

SEQ ID NO: 249 - DNA, 21 bp, Artificial Sequence
  HIF-1 target sequence
aagaaaccacctatgacctgc

SEQ ID NO: 250 - DNA, 21 bp, Artificial Sequence
  HIF-1 target sequence
aaccacctatgacctgcttgg

SEQ ID NO: 251 - DNA, 21 bp, Artificial Sequence
  HIF-1 target sequence
aacccattcctcacccatcaa

SEQ ID NO: 252 - DNA, 21 bp, Artificial Sequence
  HIF-1 target sequence
aaatattgaaattcctttaga

SEQ ID NO: 253 - DNA, 21 bp, Artificial Sequence
  HIF-1 target sequence
aatattgaaattcctttagat

SEQ ID NO: 254 - DNA, 21 bp, Artificial Sequence
  HIF-1 target sequence
aaattcctttagatagcaaga

SEQ ID NO: 255 - DNA, 21 bp, Artificial Sequence
  HIF-1 target sequence
aattcctttagatagcaagac

SEQ ID NO: 256 - DNA, 21 bp, Artificial Sequence
  HIF-1 target sequence
aagactttcctcagtcgacac

SEQ ID NO: 257 - DNA, 21 bp, Artificial Sequence
  HIF-1 target sequence
aaattttcttattgtgatgaa

SEQ ID NO: 258 - DNA, 21 bp, Artificial Sequence
  HIF-1 target sequence
aattttcttattgtgatgaaa

SEQ ID NO: 259 - DNA, 21 bp, Artificial Sequence
  HIF-1 target sequence
aaagaattaccgaattgatgg

SEQ ID NO: 260 - DNA, 21 bp, Artificial Sequence
  HIF-1 target sequence
aattaccgaattgatgggata

SEQ ID NO: 261 - DNA, 21 bp, Artificial Sequence
  HIF-1 target sequence
aattaccgaattgatgggata

SEQ ID NO: 262 - DNA, 21 bp, Artificial Sequence
  HIF-1 target sequence
aagaacttttaggccgctcaa

SEQ ID NO: 263 - DNA, 21 bp, Artificial Sequence
  HIF-1 target sequence
aacttttaggccgctcaattt

SEQ ID NO: 264 - DNA, 21 bp, Artificial Sequence
  HIF-1 target sequence
aatttatgaatattatcatgc

SEQ ID NO: 265 - DNA, 21 bp, Artificial Sequence
  HIF-1 target sequence
aatattatcatgctttggact

SEQ ID NO: 266 - DNA, 21 bp, Artificial Sequence
  HIF-1 target sequence
aaaactcatcatgatatgttt

SEQ ID NO: 267 - DNA, 21 bp, Artificial Sequence
  HIF-1 target sequence
aaactcatcatgatatgttta

SEQ ID NO: 268 - DNA, 21 bp, Artificial Sequence
  HIF-1 target sequence
aactcatcatgatatgtttac

SEQ ID NO: 269 - DNA, 21 bp, Artificial Sequence
  HIF-1 target sequence
aaaggacaagtcaccacagga

SEQ ID NO: 270 - DNA, 21 bp, Artificial Sequence
  HIF-1 target sequence
aaggacaagtcaccacaggac

SEQ ID NO: 271 - DNA, 21 bp, Artificial Sequence
  HIF-1 target sequence
aagtcaccacaggacagtaca

SEQ ID NO: 272 - DNA, 21 bp, Artificial Sequence
  HIF-1 target sequence
aaaagaggtggatatgtctgg

SEQ ID NO: 273 - DNA, 21 bp, Artificial Sequence
  HIF-1 target sequence
aaagaggtggatatgtctggg

SEQ ID NO: 274 - DNA, 21 bp, Artificial Sequence
  HIF-1 target sequence
aagaggtggatatgtctgggt

SEQ ID NO: 275 - DNA, 21 bp, Artificial Sequence
  HIF-1 target sequence
aaactcaagcaactgtcatat

SEQ ID NO: 276 - DNA, 21 bp, Artificial Sequence
  HIF-1 target sequence
aactcaagcaactgtcatata

SEQ ID NO: 277 - DNA, 21 bp, Artificial Sequence
  HIF-1 target sequence
aagcaactgtcatatataaca

SEQ ID NO: 278 - DNA, 21 bp, Artificial Sequence
  HIF-1 target sequence
aactgtcatatataacaccaa

SEQ ID NO: 279 - DNA, 21 bp, Artificial Sequence
  HIF-1 target sequence
aacaccaagaattctcaacca

SEQ ID NO: 280 - DNA, 21 bp, Artificial Sequence
  HIF-1 target sequence
aagaattctcaaccacagtgc

SEQ ID NO: 281 - DNA, 21 bp, Artificial Sequence
  HIF-1 target sequence
aattctcaaccacagtgcatt

SEQ ID NO: 282 - DNA, 21 bp, Artificial Sequence
  HIF-1 target sequence
aaccacagtgcattgtatgtg

SEQ ID NO: 283 - DNA, 21 bp, Artificial Sequence
  HIF-1 target sequence
aattacgttgtgagtggtatt

SEQ ID NO: 284 - DNA, 21 bp, Artificial Sequence
  HIF-1 target sequence
aacaaacagaatgtgtcctta

SEQ ID NO: 285 - DNA, 21 bp, Artificial Sequence
  HIF-1 target sequence
aaacagaatgtgtccttaaac

SEQ ID NO: 286 - DNA, 21 bp, Artificial Sequence
  HIF-1 target sequence
aacagaatgtgtccttaaacc

SEQ ID NO: 287 - DNA, 20 bp, Artificial Sequence
  HIF-1 target sequence
atgtgtccttaaaccggttg

SEQ ID NO: 288 - DNA, 21 bp, Artificial Sequence
  HIF-1 target sequence
aaaccggttgaatcttcagat

SEQ ID NO: 289 - DNA, 21 bp, Artificial Sequence
  HIF-1 target sequence
aaccggttgaatcttcagata

SEQ ID NO: 290 - DNA, 21 bp, Artificial Sequence
  HIF-1 target sequence
aatcttcagatatgaaaatga

SEQ ID NO: 291 - DNA, 21 bp, Artificial Sequence
  HIF-1 target sequence
aaaatgactcagctattcacc

SEQ ID NO: 292 - DNA, 21 bp, Artificial Sequence
  HIF-1 target sequence
aaatgactcagctattcacca

SEQ ID NO: 293 - DNA, 21 bp, Artificial Sequence
  HIF-1 target sequence
aatgactcagctattcaccaa

SEQ ID NO: 294 - DNA, 21 bp, Artificial Sequence
  HIF-1 target sequence
aaagttgaatcagaagataca

SEQ ID NO: 295 - DNA, 21 bp, Artificial Sequence
  HIF-1 target sequence
aagttgaatcagaagatacaa

SEQ ID NO: 296 - DNA, 21 bp, Artificial Sequence
  HIF-1 target sequence
aatcagaagatacaagtagcc

SEQ ID NO: 297 - DNA, 21 bp, Artificial Sequence
  HIF-1 target sequence
aagatacaagtagcctctttg

SEQ ID NO: 298 - DNA, 21 bp, Artificial Sequence
  HIF-1 target sequence
aagtagcctctttgacaaact

SEQ ID NO: 299 - DNA, 21 bp, Artificial Sequence
  HIF-1 target sequence
aaacttaagaaggaacctgat

SEQ ID NO: 300 - DNA, 21 bp, Artificial Sequence
  HIF-1 target sequence
aacttaagaaggaacctgatg

SEQ ID NO: 301 - DNA, 21 bp, Artificial Sequence
  HIF-1 target sequence
aagaaggaacctgatgcttta

SEQ ID NO: 302 - DNA, 21 bp, Artificial Sequence
  HIF-1 target sequence
aaggaacctgatgctttaact

SEQ ID NO: 303 - DNA, 21 bp, Artificial Sequence
  HIF-1 target sequence
aacctgatgctttaactttgc

SEQ ID NO: 304 - DNA, 21 bp, Artificial Sequence
  HIF-1 target sequence
aactttgctggccccagccgc

SEQ ID NO: 305 - DNA, 21 bp, Artificial Sequence
  HIF-1 target sequence
aatcatatctttagattttgg

SEQ ID NO: 306 - DNA, 21 bp, Artificial Sequence
  HIF-1 target sequence
aacgacacagaaactgatgac

SEQ ID NO: 307 - DNA, 21 bp, Artificial Sequence
  HIF-1 target sequence
aaactgatgaccagcaacttg

SEQ ID NO: 308 - DNA, 21 bp, Artificial Sequence
  HIF-1 target sequence
aactgatgaccagcaacttga

SEQ ID NO: 309 - DNA, 21 bp, Artificial Sequence
  HIF-1 target sequence
aacttgaggaagtaccattat

SEQ ID NO: 310 - DNA, 21 bp, Artificial Sequence
  HIF-1 target sequence
aagtaccattatataatgatg

SEQ ID NO: 311 - DNA, 21 bp, Artificial Sequence
  HIF-1 target sequence
aatgatgtaatgctcccctca

SEQ ID NO: 312 - DNA, 21 bp, Artificial Sequence
  HIF-1 target sequence
aatgctcccctcacccaacga

SEQ ID NO: 313 - DNA, 21 bp, Artificial Sequence
  HIF-1 target sequence
aacgaaaaattacagaatata

SEQ ID NO: 314 - DNA, 21 bp, Artificial Sequence
  HIF-1 target sequence
aaaaattacagaatataaatt

SEQ ID NO: 315 - DNA, 21 bp, Artificial Sequence
  HIF-1 target sequence
aaaattacagaatataaattt

SEQ ID NO: 316 - DNA, 21 bp, Artificial Sequence
  HIF-1 target sequence
aaattacagaatataaatttg

SEQ ID NO: 317 - DNA, 21 bp, Artificial Sequence
  HIF-1 target sequence
aattacagaatataaatttgg

SEQ ID NO: 318 - DNA, 21 bp, Artificial Sequence
  HIF-1 target sequence
aatataaatttggcaatgtct

SEQ ID NO: 319 - DNA, 21 bp, Artificial Sequence
  HIF-1 target sequence
aaatttggcaatgtctccatt

SEQ ID NO: 320 - DNA, 21 bp, Artificial Sequence
  HIF-1 target sequence
aatttggcaatgtctccatta

SEQ ID NO: 321 - DNA, 21 bp, Artificial Sequence
  HIF-1 target sequence
aatgtctccattacccaccgc

SEQ ID NO: 322 - DNA, 21 bp, Artificial Sequence
  HIF-1 target sequence
aaacgccaaagccacttcgaa

SEQ ID NO: 323 - DNA, 21 bp, Artificial Sequence
  HIF-1 target sequence
aacgccaaagccacttcgaag

SEQ ID NO: 324 - DNA, 21 bp, Artificial Sequence
  HIF-1 target sequence
aaagccacttcgaagtagtgc

SEQ ID NO: 325 - DNA, 21 bp, Artificial Sequence
  HIF-1 target sequence
aagccacttcgaagtagtgct

SEQ ID NO: 326 - DNA, 21 bp, Artificial Sequence
  HIF-1 target sequence
aagtagtgctgaccctgcact

SEQ ID NO: 327 - DNA, 21 bp, Artificial Sequence
  HIF-1 target sequence
aatcaagaagttgcattaaaa

SEQ ID NO: 328 - DNA, 21 bp, Artificial Sequence
  HIF-1 target sequence
aagaagttgcattaaaattag

SEQ ID NO: 329 - DNA, 21 bp, Artificial Sequence
  HIF-1 target sequence
aagttgcattaaaattagaac

SEQ ID NO: 330 - DNA, 21 bp, Artificial Sequence
  HIF-1 target sequence
aaaattagaaccaaatccaga

SEQ ID NO: 331 - DNA, 21 bp, Artificial Sequence
  HIF-1 target sequence
aaattagaaccaaatccagag

SEQ ID NO: 332 - DNA, 21 bp, Artificial Sequence
  HIF-1 target sequence
aattagaaccaaatccagagt

SEQ ID NO: 333 - DNA, 21 bp, Artificial Sequence
  HIF-1 target sequence
aaccaaatccagagtcactgg

SEQ ID NO: 334 - DNA, 21 bp, Artificial Sequence
  HIF-1 target sequence
aaatccagagtcactggaact

SEQ ID NO: 335 - DNA, 21 bp, Artificial Sequence
  HIF-1 target sequence
aatccagagtcactggaactt

SEQ ID NO: 336 - DNA, 21 bp, Artificial Sequence
  HIF-1 target sequence
aactttcttttaccatgcccc

SEQ ID NO: 337 - DNA, 21 bp, Artificial Sequence
  HIF-1 target sequence
aagcactagacaaagttcacc

SEQ ID NO: 338 - DNA, 21 bp, Artificial Sequence
  HIF-1 target sequence
aaagttcacctgagcctaata

SEQ ID NO: 339 - DNA, 21 bp, Artificial Sequence
  HIF-1 target sequence
aagttcacctgagcctaatag

SEQ ID NO: 340 - DNA, 21 bp, Artificial Sequence
  HIF-1 target sequence
aatagtcccagtgaatattgt

SEQ ID NO: 341 - DNA, 21 bp, Artificial Sequence
  HIF-1 target sequence
aatattgtttttatgtggata

SEQ ID NO: 342 - DNA, 21 bp, Artificial Sequence
  HIF-1 target sequence
aatgaattcaagttggaattg

SEQ ID NO: 343 - DNA, 21 bp, Artificial Sequence
  HIF-1 target sequence
aattcaagttggaattggtag

SEQ ID NO: 344 - DNA, 21 bp, Artificial Sequence
  HIF-1 target sequence
aagttggaattggtagaaaaa

SEQ ID NO: 345 - DNA, 21 bp, Artificial Sequence
  HIF-1 target sequence
aattggtagaaaaactttttg

SEQ ID NO: 346 - DNA, 21 bp, Artificial Sequence
  HIF-1 target sequence
aaaactttttgctgaagacac

SEQ ID NO: 347 - DNA, 21 bp, Artificial Sequence
  HIF-1 target sequence
aaactttttgctgaagacaca

SEQ ID NO: 348 - DNA, 21 bp, Artificial Sequence
  HIF-1 target sequence
aactttttgctgaagacacag

SEQ ID NO: 349 - DNA, 21 bp, Artificial Sequence
  HIF-1 target sequence
aagacacagaagcaaagaacc

SEQ ID NO: 350 - DNA, 21 bp, Artificial Sequence
  HIF-1 target sequence
aagcaaagaacccattttcta

SEQ ID NO: 351 - DNA, 21 bp, Artificial Sequence
  HIF-1 target sequence
aaagaacccattttctactca

SEQ ID NO: 352 - DNA, 21 bp, Artificial Sequence
  HIF-1 target sequence
aagaacccattttctactcag

SEQ ID NO: 353 - DNA, 21 bp, Artificial Sequence
  HIF-1 target sequence
aacccattttctactcaggac

SEQ ID NO: 354 - DNA, 21 bp, Artificial Sequence
  HIF-1 target sequence
aatggatgatgacttccagtt

SEQ ID NO: 355 - DNA, 21 bp, Artificial Sequence
  HIF-1 target sequence
aaagcagttccgcaagccctg

SEQ ID NO: 356 - DNA, 21 bp, Artificial Sequence
  HIF-1 target sequence
aagcagttccgcaagccctga

SEQ ID NO: 357 - DNA, 21 bp, Artificial Sequence
  HIF-1 target sequence
aagccctgaaagcgcaagtcc

SEQ ID NO: 358 - DNA, 21 bp, Artificial Sequence
  HIF-1 target sequence
aaagcgcaagtcctcaaagca

SEQ ID NO: 359 - DNA, 21 bp, Artificial Sequence
  HIF-1 target sequence
aagcgcaagtcctcaaagcac

SEQ ID NO: 360 - DNA, 21 bp, Artificial Sequence
  HIF-1 target sequence
aagtcctcaaagcacagttac

SEQ ID NO: 361 - DNA, 21 bp, Artificial Sequence
  HIF-1 target sequence
aaagcacagttacagtattcc

SEQ ID NO: 362 - DNA, 21 bp, Artificial Sequence
  HIF-1 target sequence
aagcacagttacagtattcca

SEQ ID NO: 363 - DNA, 21 bp, Artificial Sequence
  HIF-1 target sequence
aaatacaagaacctactgcta

SEQ ID NO: 364 - DNA, 21 bp, Artificial Sequence
  HIF-1 target sequence
aatacaagaacctactgctaa

SEQ ID NO: 365 - DNA, 21 bp, Artificial Sequence
  HIF-1 target sequence
aagaacctactgctaatgcca

SEQ ID NO: 366 - DNA, 21 bp, Artificial Sequence
  HIF-1 target sequence
aacctactgctaatgccacca

SEQ ID NO: 367 - DNA, 21 bp, Artificial Sequence
  HIF-1 target sequence
aatgccaccactaccactgcc

SEQ ID NO: 368 - DNA, 21 bp, Artificial Sequence
  HIF-1 target sequence
aattaaaaacagtgacaaaag

SEQ ID NO: 369 - DNA, 21 bp, Artificial Sequence
  HIF-1 target sequence
aaaaacagtgacaaaagaccg

SEQ ID NO: 370 - DNA, 21 bp, Artificial Sequence
  HIF-1 target sequence
aaaacagtgacaaaagaccgt

SEQ ID NO: 371 - DNA, 21 bp, Artificial Sequence
  HIF-1 target sequence
aaacagtgacaaaagaccgta

SEQ ID NO: 372 - DNA, 21 bp, Artificial Sequence
  HIF-1 target sequence
aacagtgacaaaagaccgtat

SEQ ID NO: 373 - DNA, 21 bp, Artificial Sequence
  HIF-1 target sequence
aaaagaccgtatggaagacat

SEQ ID NO: 374 - DNA, 21 bp, Artificial Sequence
  HIF-1 target sequence
aaagaccgtatggaagacatt

SEQ ID NO: 375 - DNA, 21 bp, Artificial Sequence
  HIF-1 target sequence
aagaccgtatggaagacatta

SEQ ID NO: 376 - DNA, 21 bp, Artificial Sequence
  HIF-1 target sequence
aagacattaaaatattgattg

SEQ ID NO: 377 - DNA, 21 bp, Artificial Sequence
  HIF-1 target sequence
aaaatattgattgcatctcca

SEQ ID NO: 378 - DNA, 21 bp, Artificial Sequence
  HIF-1 target sequence
aaatattgattgcatctccat

SEQ ID NO: 379 - DNA, 21 bp, Artificial Sequence
  HIF-1 target sequence
aatattgattgcatctccatc

SEQ ID NO: 380 - DNA, 21 bp, Artificial Sequence
  HIF-1 target sequence
aaagaaactactagtgccaca

SEQ ID NO: 381 - DNA, 21 bp, Artificial Sequence
  HIF-1 target sequence
aagaaactactagtgccacat

SEQ ID NO: 382 - DNA, 21 bp, Artificial Sequence
  HIF-1 target sequence
aaactactagtgccacatcat

SEQ ID NO: 383 - DNA, 21 bp, Artificial Sequence
  HIF-1 target sequence
aactactagtgccacatcatc

SEQ ID NO: 384 - DNA, 21 bp, Artificial Sequence
  HIF-1 target sequence
aaagtcggacagcctcaccaa

SEQ ID NO: 385 - DNA, 21 bp, Artificial Sequence
  HIF-1 target sequence
aagtcggacagcctcaccaaa

SEQ ID NO: 386 - DNA, 21 bp, Artificial Sequence
  HIF-1 target sequence
aaacagagcaggaaaaggagt

SEQ ID NO: 387 - DNA, 21 bp, Artificial Sequence
  HIF-1 target sequence
aacagagcaggaaaaggagtc

SEQ ID NO: 388 - DNA, 21 bp, Artificial Sequence
  HIF-1 target sequence
aaaaggagtcatagaacagac

SEQ ID NO: 389 - DNA, 21 bp, Artificial Sequence
  HIF-1 target sequence
aaaggagtcatagaacagaca

SEQ ID NO: 390 - DNA, 21 bp, Artificial Sequence
  HIF-1 target sequence
aaggagtcatagaacagacag

SEQ ID NO: 391 - DNA, 21 bp, Artificial Sequence
  HIF-1 target sequence
aacagacagaaaaatctcatc

SEQ ID NO: 392 - DNA, 21 bp, Artificial Sequence
  HIF-1 target sequence
aaaaatctcatccaagaagcc

SEQ ID NO: 393 - DNA, 21 bp, Artificial Sequence
  HIF-1 target sequence
aaaatctcatccaagaagccc

SEQ ID NO: 394 - DNA, 21 bp, Artificial Sequence
  HIF-1 target sequence
aaatctcatccaagaagccct

SEQ ID NO: 395 - DNA, 21 bp, Artificial Sequence
  HIF-1 target sequence
aatctcatccaagaagcccta

SEQ ID NO: 396 - DNA, 21 bp, Artificial Sequence
  HIF-1 target sequence
aagaagccctaacgtgttatc

SEQ ID NO: 397 - DNA, 21 bp, Artificial Sequence
  HIF-1 target sequence
aagccctaacgtgttatctgt

SEQ ID NO: 398 - DNA, 21 bp, Artificial Sequence
  HIF-1 target sequence
aacgtgttatctgtcgctttg

SEQ ID NO: 399 - DNA, 21 bp, Artificial Sequence
  HIF-1 target sequence
aaagaactacagttcctgagg

SEQ ID NO: 400 - DNA, 21 bp, Artificial Sequence
  HIF-1 target sequence
aagaactacagttcctgagga

SEQ ID NO: 401 - DNA, 21 bp, Artificial Sequence
  HIF-1 target sequence
aactacagttcctgaggaaga

SEQ ID NO: 402 - DNA, 21 bp, Artificial Sequence
  HIF-1 target sequence
aagaactaaatccaaagatac

SEQ ID NO: 403 - DNA, 21 bp, Artificial Sequence
  HIF-1 target sequence
aactaaatccaaagatactag

SEQ ID NO: 404 - DNA, 21 bp, Artificial Sequence
  HIF-1 target sequence
aaatccaaagatactagcttt

SEQ ID NO: 405 - DNA, 21 bp, Artificial Sequence
  HIF-1 target sequence
aatccaaagatactagctttg

SEQ ID NO: 406 - DNA, 21 bp, Artificial Sequence
  HIF-1 target sequence
aaagatactagctttgcagaa

SEQ ID NO: 407 - DNA, 21 bp, Artificial Sequence
  HIF-1 target sequence
aagatactagctttgcagaat

SEQ ID NO: 408 - DNA, 21 bp, Artificial Sequence
  HIF-1 target sequence
aatgctcagagaaagcgaaaa

SEQ ID NO: 409 - DNA, 21 bp, Artificial Sequence
  HIF-1 target sequence
aaagcgaaaaatggaacatga

SEQ ID NO: 410 - DNA, 21 bp, Artificial Sequence
  HIF-1 target sequence
aagcgaaaaatggaacatgat

SEQ ID NO: 411 - DNA, 21 bp, Artificial Sequence
  HIF-1 target sequence
aaaaatggaacatgatggttc

SEQ ID NO: 412 - DNA, 21 bp, Artificial Sequence
  HIF-1 target sequence
aaaatggaacatgatggttca

SEQ ID NO: 413 - DNA, 21 bp, Artificial Sequence
  HIF-1 target sequence
aaatggaacatgatggttcac

SEQ ID NO: 414 - DNA, 21 bp, Artificial Sequence
  HIF-1 target sequence
aatggaacatgatggttcact

SEQ ID NO: 415 - DNA, 21 bp, Artificial Sequence
  HIF-1 target sequence
aacatgatggttcactttttc

SEQ ID NO: 416 - DNA, 21 bp, Artificial Sequence
  HIF-1 target sequence
aagcagtaggaattggaacat

SEQ ID NO: 417 - DNA, 21 bp, Artificial Sequence
  HIF-1 target sequence
aattggaacattattacagca

SEQ ID NO: 418 - DNA, 21 bp, Artificial Sequence
  HIF-1 target sequence
aacattattacagcagccaga

SEQ ID NO: 419 - DNA, 21 bp, Artificial Sequence
  HIF-1 target sequence
aaacgtgtaaaaggatgcaaa

SEQ ID NO: 420 - DNA, 21 bp, Artificial Sequence
  HIF-1 target sequence
aacgtgtaaaaggatgcaaat

SEQ ID NO: 421 - DNA, 21 bp, Artificial Sequence
  HIF-1 target sequence
aaaaggatgcaaatctagtga

SEQ ID NO: 422 - DNA, 21 bp, Artificial Sequence
  HIF-1 target sequence
aaaggatgcaaatctagtgaa

SEQ ID NO: 423 - DNA, 21 bp, Artificial Sequence
  HIF-1 target sequence
aaggatgcaaatctagtgaac

SEQ ID NO: 424 - DNA, 21 bp, Artificial Sequence
  HIF-1 target sequence
aaatctagtgaacagaatgga

SEQ ID NO: 425 - DNA, 21 bp, Artificial Sequence
  HIF-1 target sequence
aatctagtgaacagaatggaa

SEQ ID NO: 426 - DNA, 21 bp, Artificial Sequence
  HIF-1 target sequence
aacagaatggaatggagcaaa

SEQ ID NO: 427 - DNA, 21 bp, Artificial Sequence
  HIF-1 target sequence
aatggaatggagcaaaagaca

SEQ ID NO: 428 - DNA, 21 bp, Artificial Sequence
  HIF-1 target sequence
aatggagcaaaagacaattat

SEQ ID NO: 429 - DNA, 21 bp, Artificial Sequence
  HIF-1 target sequence
aaaagacaattattttaatac

SEQ ID NO: 430 - DNA, 21 bp, Artificial Sequence
  HIF-1 target sequence
aaagacaattattttaatacc

SEQ ID NO: 431 - DNA, 21 bp, Artificial Sequence
  HIF-1 target sequence
aagacaattattttaataccc

SEQ ID NO: 432 - DNA, 21 bp, Artificial Sequence
  HIF-1 target sequence
aattattttaataccctctga

SEQ ID NO: 433 - DNA, 21 bp, Artificial Sequence
  HIF-1 target sequence
aataccctctgatttagcatg

SEQ ID NO: 434 - DNA, 21 bp, Artificial Sequence
  HIF-1 target sequence
aatcaatggatgaaagtggat

SEQ ID NO: 435 - DNA, 21 bp, Artificial Sequence
  HIF-1 target sequence
aatggatgaaagtggattacc

SEQ ID NO: 436 - DNA, 21 bp, Artificial Sequence
  HIF-1 target sequence
aaagtggattaccacagctga

SEQ ID NO: 437 - DNA, 21 bp, Artificial Sequence
  HIF-1 target sequence
aagtggattaccacagctgac

SEQ ID NO: 438 - DNA, 21 bp, Artificial Sequence
  HIF-1 target sequence
catcagttgccacttccacat

SEQ ID NO: 439 - DNA, 21 bp, Artificial Sequence
  HIF-1 target sequence
cttggatggttttgttatggt

SEQ ID NO: 440 - DNA, 21 bp, Artificial Sequence
  HIF-1 target sequence
atgggattaactcagtttgaa

SEQ ID NO: 441 - DNA, 21 bp, Artificial Sequence
  HIF-1 target sequence
gtctgcaacatggaaggtatt

SEQ ID NO: 442 - DNA, 21 bp, Artificial Sequence
  HIF-1 target sequence
cattcctcacccatcaaatat

SEQ ID NO: 443 - DNA, 21 bp, Artificial Sequence
  HIF-1 target sequence
aggccgctcaatttatgaata

SEQ ID NO: 444 - DNA, 21 bp, Artificial Sequence
  HIF-1 target sequence
tcatatataacaccaagaatt

SEQ ID NO: 445 - DNA, 21 bp, Artificial Sequence
  HIF-1 target sequence
tgtccttaaaccggttgaatc

SEQ ID NO: 446 - DNA, 21 bp, Artificial Sequence
  HIF-1 target sequence
agcctctttgacaaacttaag

SEQ ID NO: 447 - DNA, 21 bp, Artificial Sequence
  HIF-1 target sequence
atgaccagcaacttgaggaag

SEQ ID NO: 448 - DNA, 21 bp, Artificial Sequence
  HIF-1 target sequence
cattacccaccgctgaaacgc

SEQ ID NO: 449 - DNA, 21 bp, Artificial Sequence
  HIF-1 target sequence
agattcaggatcagacaccta

SEQ ID NO: 450 - DNA, 21 bp, Artificial Sequence
  HIF-1 target sequence
atagtgatatggtcaatgaat

SEQ ID NO: 451 - DNA, 21 bp, Artificial Sequence
  HIF-1 target sequence
acacagatttagacttggaga

SEQ ID NO: 452 - DNA, 21 bp, Artificial Sequence
  HIF-1 target sequence
cacagttacagtattccagca

SEQ ID NO: 453 - DNA, 21 bp, Artificial Sequence
  HIF-1 target sequence
attgattgcatctccatctcc

SEQ ID NO: 454 - DNA, 21 bp, Artificial Sequence
  HIF-1 target sequence
atactagctttgcagaatgct

SEQ ID NO: 455 - DNA, 21 bp, Artificial Sequence
  HIF-1 target sequence
attattacagcagccagacga

SEQ ID NO: 456 - DNA, 21 bp, Artificial Sequence
  HIF-1 target sequence
acaattattttaataccctct

SEQ ID NO: 457 - DNA, 21 bp, Artificial Sequence
  HIF-1 target sequence
accagttatgattgtgaagtt

SEQ ID NO: 458 - DNA, 21 bp, Artificial Sequence
  HIF-1 target sequence
aactaactggacacagtgtgt

SEQ ID NO: 459 - DNA, 21 bp, Artificial Sequence
  Flt-1 target sequence
aagcaggccagacactgcatc

SEQ ID NO: 460 - DNA, 21 bp, Artificial Sequence
  Flt-1 target sequence
aatgcaggggggaagcagccc

SEQ ID NO: 461 - DNA, 21 bp, Artificial Sequence
  Flt-1 target sequence
aagcagcccataaatggtctt

SEQ ID NO: 462 - DNA, 21 bp, Artificial Sequence
  Flt-1 target sequence
aaatggtctttgcctgaaatg

SEQ ID NO: 463 - DNA, 21 bp, Artificial Sequence
  Flt-1 target sequence
aatggtctttgcctgaaatgg

SEQ ID NO: 464 - DNA, 21 bp, Artificial Sequence
  Flt-1 target sequence
aaatggtgagtaaggaaagcg

SEQ ID NO: 465 - DNA, 21 bp, Artificial Sequence
  Flt-1 target sequence
aatggtgagtaaggaaagcga

SEQ ID NO: 466 - DNA, 21 bp, Artificial Sequence
  Flt-1 target sequence
aaggaaagcgaaaggctgagc

SEQ ID NO: 467 - DNA, 21 bp, Artificial Sequence
  Flt-1 target sequence
aaagcgaaaggctgagcataa

SEQ ID NO: 468 - DNA, 21 bp, Artificial Sequence
  Flt-1 target sequence
aagcgaaaggctgagcataac

SEQ ID NO: 469 - DNA, 21 bp, Artificial Sequence
  Flt-1 target sequence
aaaggctgagcataactaaat

SEQ ID NO: 470 - DNA, 21 bp, Artificial Sequence
  Flt-1 target sequence
aaggctgagcataactaaatc

SEQ ID NO: 471 - DNA, 21 bp, Artificial Sequence
  Flt-1 target sequence
aactaaatctgcctgtggaag

SEQ ID NO: 472 - DNA, 21 bp, Artificial Sequence
  Flt-1 target sequence
aaatctgcctgtggaagaaat

SEQ ID NO: 473 - DNA, 21 bp, Artificial Sequence
  Flt-1 target sequence
aatctgcctgtggaagaaatg

SEQ ID NO: 474 - DNA, 21 bp, Artificial Sequence
  Flt-1 target sequence
aagaaatggcaaacaattctg

SEQ ID NO: 475 - DNA, 21 bp, Artificial Sequence
  Flt-1 target sequence
aaatggcaaacaattctgcag

SEQ ID NO: 476 - DNA, 21 bp, Artificial Sequence
  Flt-1 target sequence
aatggcaaacaattctgcagt

SEQ ID NO: 477 - DNA, 21 bp, Artificial Sequence
  Flt-1 target sequence
aaacaattctgcagtacttta

SEQ ID NO: 478 - DNA, 21 bp, Artificial Sequence
  Flt-1 target sequence
aacaattctgcagtactttaa

SEQ ID NO: 479 - DNA, 21 bp, Artificial Sequence
  Flt-1 target sequence
aattctgcagtactttaacct

SEQ ID NO: 480 - DNA, 21 bp, Artificial Sequence
  Flt-1 target sequence
aaccttgaacacagctcaagc

SEQ ID NO: 481 - DNA, 21 bp, Artificial Sequence
  Flt-1 target sequence
aacacagctcaagcaaaccac

SEQ ID NO: 482 - DNA, 21 bp, Artificial Sequence
  Flt-1 target sequence
aagcaaaccacactggcttct

SEQ ID NO: 483 - DNA, 21 bp, Artificial Sequence
  Flt-1 target sequence
aaaccacactggcttctacag

SEQ ID NO: 484 - DNA, 21 bp, Artificial Sequence
  Flt-1 target sequence
aaccacactggcttctacagc

SEQ ID NO: 485 - DNA, 21 bp, Artificial Sequence
  Flt-1 target sequence
aaatatctagctgtacctact

SEQ ID NO: 486 - DNA, 21 bp, Artificial Sequence
  Flt-1 target sequence
aatatctagctgtacctactt

SEQ ID NO: 487 - DNA, 21 bp, Artificial Sequence
  Flt-1 target sequence
aaagaagaaggaaacagaatc

SEQ ID NO: 488 - DNA, 21 bp, Artificial Sequence
  Flt-1 target sequence
aagaagaaggaaacagaatct

SEQ ID NO: 489 - DNA, 21 bp, Artificial Sequence
  Flt-1 target sequence
aagaaggaaacagaatctgca

SEQ ID NO: 490 - DNA, 21 bp, Artificial Sequence
  Flt-1 target sequence
aaggaaacagaatctgcaatc

SEQ ID NO: 491 - DNA, 21 bp, Artificial Sequence
  Flt-1 target sequence
aaacagaatctgcaatctata

SEQ ID NO: 492 - DNA, 21 bp, Artificial Sequence
  Flt-1 target sequence
aacagaatctgcaatctatat

SEQ ID NO: 493 - DNA, 21 bp, Artificial Sequence
  Flt-1 target sequence
aatctgcaatctatatattta

SEQ ID NO: 494 - DNA, 21 bp, Artificial Sequence
  Flt-1 target sequence
aatctatatatttattagtga

SEQ ID NO: 495 - DNA, 21 bp, Artificial Sequence
  Flt-1 target sequence
aaatccccgaaattatacaca

SEQ ID NO: 496 - DNA, 21 bp, Artificial Sequence
  Flt-1 target sequence
aatccccgaaattatacacat

SEQ ID NO: 497 - DNA, 21 bp, Artificial Sequence
  Flt-1 target sequence
aaattatacacatgactgaag

SEQ ID NO: 498 - DNA, 21 bp, Artificial Sequence
  Flt-1 target sequence
aattatacacatgactgaagg

SEQ ID NO: 499 - DNA, 21 bp, Artificial Sequence
  Flt-1 target sequence
aaggaagggagctcgtcattc

SEQ ID NO: 500 - DNA, 21 bp, Artificial Sequence
  Flt-1 target sequence
aagggagctcgtcattccctg

SEQ ID NO: 501 - DNA, 21 bp, Artificial Sequence
  Flt-1 target sequence
aacatcactgttactttaaaa

SEQ ID NO: 502 - DNA, 21 bp, Artificial Sequence
  Flt-1 target sequence
aaaaaagtttccacttgacac

SEQ ID NO: 503 - DNA, 21 bp, Artificial Sequence
  Flt-1 target sequence
aaaaagtttccacttgacact

SEQ ID NO: 504 - DNA, 21 bp, Artificial Sequence
  Flt-1 target sequence
aaaagtttccacttgacactt

SEQ ID NO: 505 - DNA, 21 bp, Artificial Sequence
  Flt-1 target sequence
aaagtttccacttgacacttt

SEQ ID NO: 506 - DNA, 21 bp, Artificial Sequence
  Flt-1 target sequence
aagtttccacttgacactttg

SEQ ID NO: 507 - DNA, 21 bp, Artificial Sequence
  Flt-1 target sequence
aaaacgcataatctgggacag

SEQ ID NO: 508 - DNA, 21 bp, Artificial Sequence
  Flt-1 target sequence
aaacgcataatctgggacagt

SEQ ID NO: 509 - DNA, 21 bp, Artificial Sequence
  Flt-1 target sequence
aacgcataatctgggacagta

SEQ ID NO: 510 - DNA, 21 bp, Artificial Sequence
  Flt-1 target sequence
aatctgggacagtagaaaggg

SEQ ID NO: 511 - DNA, 21 bp, Artificial Sequence
  Flt-1 target sequence
aaagggcttcatcatatcaaa

SEQ ID NO: 512 - DNA, 21 bp, Artificial Sequence
  Flt-1 target sequence
aagggcttcatcatatcaaat

SEQ ID NO: 513 - DNA, 21 bp, Artificial Sequence
  Flt-1 target sequence
aaatgcaacgtacaaagaaat

SEQ ID NO: 514 - DNA, 21 bp, Artificial Sequence
  Flt-1 target sequence
aatgcaacgtacaaagaaata

SEQ ID NO: 515 - DNA, 21 bp, Artificial Sequence
  Flt-1 target sequence
aacgtacaaagaaatagggct

SEQ ID NO: 516 - DNA, 21 bp, Artificial Sequence
  Flt-1 target sequence
aaagaaatagggcttctgacc

SEQ ID NO: 517 - DNA, 21 bp, Artificial Sequence
  Flt-1 target sequence
aagaaatagggcttctgacct

SEQ ID NO: 518 - DNA, 21 bp, Artificial Sequence
  Flt-1 target sequence
aaatagggcttctgacctgtg

SEQ ID NO: 519 - DNA, 21 bp, Artificial Sequence
  Flt-1 target sequence
aatagggcttctgacctgtga

SEQ ID NO: 520 - DNA, 21 bp, Artificial Sequence
  Flt-1 target sequence
aagcaacagtcaatgggcatt

SEQ ID NO: 521 - DNA, 21 bp, Artificial Sequence
  Flt-1 target sequence
aacagtcaatgggcatttgta

SEQ ID NO: 522 - DNA, 21 bp, Artificial Sequence
  Flt-1 target sequence
aatgggcatttgtataagaca

SEQ ID NO: 523 - DNA, 21 bp, Artificial Sequence
  Flt-1 target sequence
aagacaaactatctcacacat

SEQ ID NO: 524 - DNA, 21 bp, Artificial Sequence
  Flt-1 target sequence
aaactatctcacacatcgaca

SEQ ID NO: 525 - DNA, 21 bp, Artificial Sequence
  Flt-1 target sequence
aactatctcacacatcgacaa

SEQ ID NO: 526 - DNA, 21 bp, Artificial Sequence
  Flt-1 target sequence
aaaccaatacaatcatagatg

SEQ ID NO: 527 - DNA, 21 bp, Artificial Sequence
  Flt-1 target sequence
aaccaatacaatcatagatgt

SEQ ID NO: 528 - DNA, 21 bp, Artificial Sequence
  Flt-1 target sequence
aatacaatcatagatgtccaa

SEQ ID NO: 529 - DNA, 21 bp, Artificial Sequence
  Flt-1 target sequence
aatcatagatgtccaaataag

SEQ ID NO: 530 - DNA, 21 bp, Artificial Sequence
  Flt-1 target sequence
aaataagcacaccacgcccag

SEQ ID NO: 531 - DNA, 21 bp, Artificial Sequence
  Flt-1 target sequence
aataagcacaccacgcccagt

SEQ ID NO: 532 - DNA, 21 bp, Artificial Sequence
  Flt-1 target sequence
aagcacaccacgcccagtcaa

SEQ ID NO: 533 - DNA, 21 bp, Artificial Sequence
  Flt-1 target sequence
aaattacttagaggccatact

SEQ ID NO: 534 - DNA, 21 bp, Artificial Sequence
  Flt-1 target sequence
aattacttagaggccatactc

SEQ ID NO: 535 - DNA, 21 bp, Artificial Sequence
  Flt-1 target sequence
aattgtactgctaccactccc

SEQ ID NO: 536 - DNA, 21 bp, Artificial Sequence
  Flt-1 target sequence
aacacgagagttcaaatgacc

SEQ ID NO: 537 - DNA, 21 bp, Artificial Sequence
  Flt-1 target sequence
aaatgacctggagttaccctg

SEQ ID NO: 538 - DNA, 21 bp, Artificial Sequence
  Flt-1 target sequence
aatgacctggagttaccctga

SEQ ID NO: 539 - DNA, 21 bp, Artificial Sequence
  Flt-1 target sequence
aaaaaaataagagagcttccg

SEQ ID NO: 540 - DNA, 21 bp, Artificial Sequence
  Flt-1 target sequence
aaaaaataagagagcttccgt

SEQ ID NO: 541 - DNA, 21 bp, Artificial Sequence
  Flt-1 target sequence
aaaaataagagagcttccgta

SEQ ID NO: 542 - DNA, 21 bp, Artificial Sequence
  Flt-1 target sequence
aaaataagagagcttccgtaa

SEQ ID NO: 543 - DNA, 21 bp, Artificial Sequence
  Flt-1 target sequence
aaataagagagcttccgtaag

SEQ ID NO: 544 - DNA, 21 bp, Artificial Sequence
  Flt-1 target sequence
aataagagagcttccgtaagg

SEQ ID NO: 545 - DNA, 21 bp, Artificial Sequence
  Flt-1 target sequence
aagagagcttccgtaaggcga

SEQ ID NO: 546 - DNA, 21 bp, Artificial Sequence
  Flt-1 target sequence
aaggcgacgaattgaccaaag

SEQ ID NO: 547 - DNA, 21 bp, Artificial Sequence
  Flt-1 target sequence
aattgaccaaagcaattccca

SEQ ID NO: 548 - DNA, 21 bp, Artificial Sequence
  Flt-1 target sequence
aaagcaattcccatgccaaca

SEQ ID NO: 549 - DNA, 21 bp, Artificial Sequence
  Flt-1 target sequence
aagcaattcccatgccaacat

SEQ ID NO: 550 - DNA, 21 bp, Artificial Sequence
  Flt-1 target sequence
aattcccatgccaacatattc

SEQ ID NO: 551 - DNA, 21 bp, Artificial Sequence
  Flt-1 target sequence
aacatattctacagtgttctt

SEQ ID NO: 552 - DNA, 21 bp, Artificial Sequence
  Flt-1 target sequence
aaaatgcagaacaaagacaaa

SEQ ID NO: 553 - DNA, 21 bp, Artificial Sequence
  Flt-1 target sequence
aatgcagaacaaagacaaagg

SEQ ID NO: 554 - DNA, 21 bp, Artificial Sequence
  Flt-1 target sequence
aacaaagacaaaggactttat

SEQ ID NO: 555 - DNA, 21 bp, Artificial Sequence
  Flt-1 target sequence
aaagacaaaggactttatact

SEQ ID NO: 556 - DNA, 21 bp, Artificial Sequence
  Flt-1 target sequence
aagacaaaggactttatactt

SEQ ID NO: 557 - DNA, 21 bp, Artificial Sequence
  Flt-1 target sequence
aaaggactttatacttgtcgt

SEQ ID NO: 558 - DNA, 21 bp, Artificial Sequence
  Flt-1 target sequence
aaggactttatacttgtcgtg

SEQ ID NO: 559 - DNA, 21 bp, Artificial Sequence
  Flt-1 target sequence
aaggagtggaccatcattcaa

SEQ ID NO: 560 - DNA, 21 bp, Artificial Sequence
  Flt-1 target sequence
aaatctgttaacacctcagtg

SEQ ID NO: 561 - DNA, 21 bp, Artificial Sequence
  Flt-1 target sequence
aatctgttaacacctcagtgc

SEQ ID NO: 562 - DNA, 21 bp, Artificial Sequence
  Flt-1 target sequence
aacacctcagtgcatatatat

SEQ ID NO: 563 - DNA, 21 bp, Artificial Sequence
  Flt-1 target sequence
aaagcattcatcactgtgaaa

SEQ ID NO: 564 - DNA, 21 bp, Artificial Sequence
  Flt-1 target sequence
aagcattcatcactgtgaaac

SEQ ID NO: 565 - DNA, 21 bp, Artificial Sequence
  Flt-1 target sequence
aaacatcgaaaacagcaggtg

SEQ ID NO: 566 - DNA, 21 bp, Artificial Sequence
  Flt-1 target sequence
aacatcgaaaacagcaggtgc

SEQ ID NO: 567 - DNA, 21 bp, Artificial Sequence
  Flt-1 target sequence
aaaacagcaggtgcttgaaac

SEQ ID NO: 568 - DNA, 21 bp, Artificial Sequence
  Flt-1 target sequence
aaacagcaggtgcttgaaacc

SEQ ID NO: 569 - DNA, 21 bp, Artificial Sequence
  Flt-1 target sequence
aacagcaggtgcttgaaaccg

SEQ ID NO: 570 - DNA, 21 bp, Artificial Sequence
  Flt-1 target sequence
aaaccgtagctggcaagcggt

SEQ ID NO: 571 - DNA, 21 bp, Artificial Sequence
  Flt-1 target sequence
aaccgtagctggcaagcggtc

SEQ ID NO: 572 - DNA, 21 bp, Artificial Sequence
  Flt-1 target sequence
aaccgtagctggcaagcggtc

SEQ ID NO: 573 - DNA, 21 bp, Artificial Sequence
  Flt-1 target sequence
aaagtgaaggcatttccctcg

SEQ ID NO: 574 - DNA, 21 bp, Artificial Sequence
  Flt-1 target sequence
aagtgaaggcatttccctcgc

SEQ ID NO: 575 - DNA, 21 bp, Artificial Sequence
  Flt-1 target sequence
aaggcatttccctcgccggaa

SEQ ID NO: 576 - DNA, 21 bp, Artificial Sequence
  Flt-1 target sequence
aagttgtatggttaaaagatg

SEQ ID NO: 577 - DNA, 21 bp, Artificial Sequence
  Flt-1 target sequence
aaaagatgggttacctgcgac

SEQ ID NO: 578 - DNA, 21 bp, Artificial Sequence
  Flt-1 target sequence
aaagatgggttacctgcgact

SEQ ID NO: 579 - DNA, 21 bp, Artificial Sequence
  Flt-1 target sequence
aagatgggttacctgcgactg

SEQ ID NO: 580 - DNA, 21 bp, Artificial Sequence
  Flt-1 target sequence
aaatctgctcgctatttgact

SEQ ID NO: 581 - DNA, 21 bp, Artificial Sequence
  Flt-1 target sequence
aatctgctcgctatttgactc

SEQ ID NO: 582 - DNA, 21 bp, Artificial Sequence
  Flt-1 target sequence
aattatcaaggacgtaactga

SEQ ID NO: 583 - DNA, 21 bp, Artificial Sequence
  Flt-1 target sequence
aaggacgtaactgaagaggat

SEQ ID NO: 584 - DNA, 21 bp, Artificial Sequence
  Flt-1 target sequence
aactgaagaggatgcagggaa

SEQ ID NO: 585 - DNA, 21 bp, Artificial Sequence
  Flt-1 target sequence
aagaggatgcagggaattata

SEQ ID NO: 586 - DNA, 21 bp, Artificial Sequence
  Flt-1 target sequence
aattatacaatcttgctgagc

SEQ ID NO: 587 - DNA, 21 bp, Artificial Sequence
  Flt-1 target sequence
aatcttgctgagcataaaaca

SEQ ID NO: 588 - DNA, 21 bp, Artificial Sequence
  Flt-1 target sequence
aaaacagtcaaatgtgtttaa

SEQ ID NO: 589 - DNA, 21 bp, Artificial Sequence
  Flt-1 target sequence
aaacagtcaaatgtgtttaaa

SEQ ID NO: 590 - DNA, 21 bp, Artificial Sequence
  Flt-1 target sequence
aacagtcaaatgtgtttaaaa

SEQ ID NO: 591 - DNA, 21 bp, Artificial Sequence
  Flt-1 target sequence
aaatgtgtttaaaaacctcac

SEQ ID NO: 592 - DNA, 21 bp, Artificial Sequence
  Flt-1 target sequence
aatgtgtttaaaaacctcact

SEQ ID NO: 593 - DNA, 21 bp, Artificial Sequence
  Flt-1 target sequence
aaaaacctcactgccactcta

SEQ ID NO: 594 - DNA, 21 bp, Artificial Sequence
  Flt-1 target sequence
aaaacctcactgccactctaa

SEQ ID NO: 595 - DNA, 21 bp, Artificial Sequence
  Flt-1 target sequence
aaacctcactgccactctaat

SEQ ID NO: 596 - DNA, 21 bp, Artificial Sequence
  Flt-1 target sequence
aacctcactgccactctaatt

SEQ ID NO: 597 - DNA, 21 bp, Artificial Sequence
  Flt-1 target sequence
aattgtcaatgtgaaacccca

SEQ ID NO: 598 - DNA, 21 bp, Artificial Sequence
  Flt-1 target sequence
aatgtgaaaccccagatttac

SEQ ID NO: 599 - DNA, 21 bp, Artificial Sequence
  Flt-1 target sequence
aaaccccagatttacgaaaag

SEQ ID NO: 600 - DNA, 21 bp, Artificial Sequence
  Flt-1 target sequence
aaccccagatttacgaaaagg

SEQ ID NO: 601 - DNA, 21 bp, Artificial Sequence
  Flt-1 target sequence
aaaaggccgtgtcatcgtttc

SEQ ID NO: 602 - DNA, 21 bp, Artificial Sequence
  Flt-1 target sequence
aaaggccgtgtcatcgtttcc

SEQ ID NO: 603 - DNA, 21 bp, Artificial Sequence
  Flt-1 target sequence
aaggccgtgtcatcgtttcca

SEQ ID NO: 604 - DNA, 21 bp, Artificial Sequence
  Flt-1 target sequence
aaatcctgacttgtaccgcat

SEQ ID NO: 605 - DNA, 21 bp, Artificial Sequence
  Flt-1 target sequence
aatcctgacttgtaccgcata

SEQ ID NO: 606 - DNA, 21 bp, Artificial Sequence
  Flt-1 target sequence
aacctacaatcaagtggttct

SEQ ID NO: 607 - DNA, 21 bp, Artificial Sequence
  Flt-1 target sequence
aatcaagtggttctggcaccc

SEQ ID NO: 608 - DNA, 21 bp, Artificial Sequence
  Flt-1 target sequence
aagtggttctggcacccctgt

SEQ ID NO: 609 - DNA, 21 bp, Artificial Sequence
  Flt-1 target sequence
aaccataatcattccgaagca

SEQ ID NO: 610 - DNA, 21 bp, Artificial Sequence
  Flt-1 target sequence
aatcattccgaagcaaggtgt

SEQ ID NO: 611 - DNA, 21 bp, Artificial Sequence
  Flt-1 target sequence
aagcaaggtgtgacttttgtt

SEQ ID NO: 612 - DNA, 21 bp, Artificial Sequence
  Flt-1 target sequence
aaggtgtgacttttgttccaa

SEQ ID NO: 613 - DNA, 21 bp, Artificial Sequence
  Flt-1 target sequence
aataatgaagagtcctttatc

SEQ ID NO: 614 - DNA, 21 bp, Artificial Sequence
  Flt-1 target sequence
aatgaagagtcctttatcctg

SEQ ID NO: 615 - DNA, 21 bp, Artificial Sequence
  Flt-1 target sequence
aagagtcctttatcctggatg

SEQ ID NO: 616 - DNA, 21 bp, Artificial Sequence
  Flt-1 target sequence
aacatgggaaacagaattgag

SEQ ID NO: 617 - DNA, 21 bp, Artificial Sequence
  Flt-1 target sequence
aaacagaattgagagcatcac

SEQ ID NO: 618 - DNA, 21 bp, Artificial Sequence
  Flt-1 target sequence
aacagaattgagagcatcact

SEQ ID NO: 619 - DNA, 21 bp, Artificial Sequence
  Flt-1 target sequence
aattgagagcatcactcagcg

SEQ ID NO: 620 - DNA, 21 bp, Artificial Sequence
  Flt-1 target sequence
aataatagaaggaaagaataa

SEQ ID NO: 621 - DNA, 21 bp, Artificial Sequence
  Flt-1 target sequence
aatagaaggaaagaataagat

SEQ ID NO: 622 - DNA, 21 bp, Artificial Sequence
  Flt-1 target sequence
aaggaaagaataagatggcta

SEQ ID NO: 623 - DNA, 21 bp, Artificial Sequence
  Flt-1 target sequence
aaagaataagatggctagcac

SEQ ID NO: 624 - DNA, 21 bp, Artificial Sequence
  Flt-1 target sequence
aagaataagatggctagcacc

SEQ ID NO: 625 - DNA, 21 bp, Artificial Sequence
  Flt-1 target sequence
aataagatggctagcaccttg

SEQ ID NO: 626 - DNA, 21 bp, Artificial Sequence
  Flt-1 target sequence
aagatggctagcaccttggtt

SEQ ID NO: 627 - DNA, 21 bp, Artificial Sequence
  Flt-1 target sequence
aatttctggaatctacatttg

SEQ ID NO: 628 - DNA, 21 bp, Artificial Sequence
  Flt-1 target sequence
aatctacatttgcatagcttc

SEQ ID NO: 629 - DNA, 21 bp, Artificial Sequence
  Flt-1 target sequence
aataaagttgggactgtggga

SEQ ID NO: 630 - DNA, 21 bp, Artificial Sequence
  Flt-1 target sequence
aaagttgggactgtgggaaga

SEQ ID NO: 631 - DNA, 21 bp, Artificial Sequence
  Flt-1 target sequence
aagttgggactgtgggaagaa

SEQ ID NO: 632 - DNA, 21 bp, Artificial Sequence
  Flt-1 target sequence
aagaaacataagcttttatat

SEQ ID NO: 633 - DNA, 21 bp, Artificial Sequence
  Flt-1 target sequence
aaacataagcttttatatcac

SEQ ID NO: 634 - DNA, 21 bp, Artificial Sequence
  Flt-1 target sequence
aacataagcttttatatcaca

SEQ ID NO: 635 - DNA, 21 bp, Artificial Sequence
  Flt-1 target sequence
aagcttttatatcacagatgt

SEQ ID NO: 636 - DNA, 21 bp, Artificial Sequence
  Flt-1 target sequence
aaatgggtttcatgttaactt

SEQ ID NO: 637 - DNA, 21 bp, Artificial Sequence
  Flt-1 target sequence
aatgggtttcatgttaacttg

SEQ ID NO: 638 - DNA, 21 bp, Artificial Sequence
  Flt-1 target sequence
aacttggaaaaaatgccgacg

SEQ ID NO: 639 - DNA, 21 bp, Artificial Sequence
  Flt-1 target sequence
aaaaaatgccgacggaaggag

SEQ ID NO: 640 - DNA, 21 bp, Artificial Sequence
  Flt-1 target sequence
aaaaatgccgacggaaggaga

SEQ ID NO: 641 - DNA, 21 bp, Artificial Sequence
  Flt-1 target sequence
aaaatgccgacggaaggagag

SEQ ID NO: 642 - DNA, 21 bp, Artificial Sequence
  Flt-1 target sequence
aaatgccgacggaaggagagg

SEQ ID NO: 643 - DNA, 21 bp, Artificial Sequence
  Flt-1 target sequence
aatgccgacggaaggagagga

SEQ ID NO: 644 - DNA, 21 bp, Artificial Sequence
  Flt-1 target sequence
aaggagaggacctgaaactgt

SEQ ID NO: 645 - DNA, 21 bp, Artificial Sequence
  Flt-1 target sequence
aaactgtcttgcacagttaac

SEQ ID NO: 646 - DNA, 21 bp, Artificial Sequence
  Flt-1 target sequence
aactgtcttgcacagttaaca

SEQ ID NO: 647 - DNA, 21 bp, Artificial Sequence
  Flt-1 target sequence
aacaagttcttatacagagac

SEQ ID NO: 648 - DNA, 21 bp, Artificial Sequence
  Flt-1 target sequence
aagttcttatacagagacgtt

SEQ ID NO: 649 - DNA, 21 bp, Artificial Sequence
  Flt-1 target sequence
aataacagaacaatgcactac

SEQ ID NO: 650 - DNA, 21 bp, Artificial Sequence
  Flt-1 target sequence
aacagaacaatgcactacagt

SEQ ID NO: 651 - DNA, 21 bp, Artificial Sequence
  Flt-1 target sequence
aacaatgcactacagtattag

SEQ ID NO: 652 - DNA, 21 bp, Artificial Sequence
  Flt-1 target sequence
aatgcactacagtattagcaa

SEQ ID NO: 653 - DNA, 21 bp, Artificial Sequence
  Flt-1 target sequence
aagcaaaaaatggccatcact

SEQ ID NO: 654 - DNA, 21 bp, Artificial Sequence
  Flt-1 target sequence
aaaaaatggccatcactaagg

SEQ ID NO: 655 - DNA, 21 bp, Artificial Sequence
  Flt-1 target sequence
aaaaatggccatcactaagga

SEQ ID NO: 656 - DNA, 21 bp, Artificial Sequence
  Flt-1 target sequence
aaaatggccatcactaaggag

SEQ ID NO: 657 - DNA, 21 bp, Artificial Sequence
  Flt-1 target sequence
aaatggccatcactaaggagc

SEQ ID NO: 658 - DNA, 21 bp, Artificial Sequence
  Flt-1 target sequence
aatggccatcactaaggagca

SEQ ID NO: 659 - DNA, 21 bp, Artificial Sequence
  Flt-1 target sequence
aaggagcactccatcactctt

SEQ ID NO: 660 - DNA, 21 bp, Artificial Sequence
  Flt-1 target sequence
aatcttaccatcatgaatgtt

SEQ ID NO: 661 - DNA, 21 bp, Artificial Sequence
  Flt-1 target sequence
aatgtttccctgcaagattca

SEQ ID NO: 662 - DNA, 21 bp, Artificial Sequence
  Flt-1 target sequence
aagattcaggcacctatgcct

SEQ ID NO: 663 - DNA, 21 bp, Artificial Sequence
  Flt-1 target sequence
aatgtatacacaggggaagaa

SEQ ID NO: 664 - DNA, 21 bp, Artificial Sequence
  Flt-1 target sequence
aagaaatcctccagaagaaag

SEQ ID NO: 665 - DNA, 21 bp, Artificial Sequence
  Flt-1 target sequence
aaatcctccagaagaaagaaa

SEQ ID NO: 666 - DNA, 21 bp, Artificial Sequence
  Flt-1 target sequence
aatcctccagaagaaagaaat

SEQ ID NO: 667 - DNA, 21 bp, Artificial Sequence
  Flt-1 target sequence
aagaaagaaattacaatcaga

SEQ ID NO: 668 - DNA, 21 bp, Artificial Sequence
  Flt-1 target sequence
aaagaaattacaatcagagat

SEQ ID NO: 669 - DNA, 21 bp, Artificial Sequence
  Flt-1 target sequence
aagaaattacaatcagagatc

SEQ ID NO: 670 - DNA, 21 bp, Artificial Sequence
  Flt-1 target sequence
aaattacaatcagagatcagg

SEQ ID NO: 671 - DNA, 21 bp, Artificial Sequence
  Flt-1 target sequence
aattacaatcagagatcagga

SEQ ID NO: 672 - DNA, 21 bp, Artificial Sequence
  Flt-1 target sequence
aatcagagatcaggaagcacc

SEQ ID NO: 673 - DNA, 21 bp, Artificial Sequence
  Flt-1 target sequence
aagcaccatacctcctgcgaa

SEQ ID NO: 674 - DNA, 21 bp, Artificial Sequence
  Flt-1 target sequence
aaacctcagtgatcacacagt

SEQ ID NO: 675 - DNA, 20 bp, Artificial Sequence
  Flt-1 target sequence
aacctcagtgatcacacagt

SEQ ID NO: 676 - DNA, 21 bp, Artificial Sequence
  Flt-1 target sequence
aatggtgtccccgagcctcag

SEQ ID NO: 677 - DNA, 21 bp, Artificial Sequence
  Flt-1 target sequence
aaaaacaaccacaaaatacaa

SEQ ID NO: 678 - DNA, 21 bp, Artificial Sequence
  Flt-1 target sequence
aaaacaaccacaaaatacaac

SEQ ID NO: 679 - DNA, 21 bp, Artificial Sequence
  Flt-1 target sequence
aaacaaccacaaaatacaaca

SEQ ID NO: 680 - DNA, 21 bp, Artificial Sequence
  Flt-1 target sequence
aacaaccacaaaatacaacaa

SEQ ID NO: 681 - DNA, 21 bp, Artificial Sequence
  Flt-1 target sequence
aaccacaaaatacaacaagag

SEQ ID NO: 682 - DNA, 21 bp, Artificial Sequence
  Flt-1 target sequence
aaaatacaacaagagcctgga

SEQ ID NO: 683 - DNA, 21 bp, Artificial Sequence
  Flt-1 target sequence
aaatacaacaagagcctggaa

SEQ ID NO: 684 - DNA, 21 bp, Artificial Sequence
  Flt-1 target sequence
aatacaacaagagcctggaat

SEQ ID NO: 685 - DNA, 21 bp, Artificial Sequence
  Flt-1 target sequence
aacaagagcctggaattattt

SEQ ID NO: 686 - DNA, 21 bp, Artificial Sequence
  Flt-1 target sequence
aagagcctggaattattttag

SEQ ID NO: 687 - DNA, 21 bp, Artificial Sequence
  Flt-1 target sequence
aattattttaggaccaggaag

SEQ ID NO: 688 - DNA, 21 bp, Artificial Sequence
  Flt-1 target sequence
aagcagcacgctgtttattga

SEQ ID NO: 689 - DNA, 21 bp, Artificial Sequence
  Flt-1 target sequence
aaagagtcacagaagaggatg

SEQ ID NO: 690 - DNA, 21 bp, Artificial Sequence
  Flt-1 target sequence
aagagtcacagaagaggatga

SEQ ID NO: 691 - DNA, 21 bp, Artificial Sequence
  Flt-1 target sequence
aagaggatgaaggtgtctatc

SEQ ID NO: 692 - DNA, 21 bp, Artificial Sequence
  Flt-1 target sequence
aaggtgtctatcactgcaaag

SEQ ID NO: 693 - DNA, 21 bp, Artificial Sequence
  Flt-1 target sequence
aaagccaccaaccagaagggc

SEQ ID NO: 694 - DNA, 21 bp, Artificial Sequence
  Flt-1 target sequence
aagccaccaaccagaagggct

SEQ ID NO: 695 - DNA, 21 bp, Artificial Sequence
  Flt-1 target sequence
aaccagaagggctctgtggaa

SEQ ID NO: 696 - DNA, 21 bp, Artificial Sequence
  Flt-1 target sequence
aagggctctgtggaaagttca

SEQ ID NO: 697 - DNA, 21 bp, Artificial Sequence
  Flt-1 target sequence
aaagttcagcatacctcactg

SEQ ID NO: 698 - DNA, 21 bp, Artificial Sequence
  Flt-1 target sequence
aagttcagcatacctcactgt

SEQ ID NO: 699 - DNA, 21 bp, Artificial Sequence
  Flt-1 target sequence
aaggaacctcggacaagtcta

SEQ ID NO: 700 - DNA, 21 bp, Artificial Sequence
  Flt-1 target sequence
aacctcggacaagtctaatct

SEQ ID NO: 701 - DNA, 21 bp, Artificial Sequence
  Flt-1 target sequence
aagtctaatctggagctgatc

SEQ ID NO: 702 - DNA, 21 bp, Artificial Sequence
  Flt-1 target sequence
aatctggagctgatcactcta

SEQ ID NO: 703 - DNA, 21 bp, Artificial Sequence
  Flt-1 target sequence
aacatgcacctgtgtggctgc

SEQ ID NO: 704 - DNA, 21 bp, Artificial Sequence
  Flt-1 target sequence
aaccctctttatccgaaaaat

SEQ ID NO: 705 - DNA, 21 bp, Artificial Sequence
  Flt-1 target sequence
aaaaatgaaaaggtcttcttc

SEQ ID NO: 706 - DNA, 21 bp, Artificial Sequence
  Flt-1 target sequence
aaaatgaaaaggtcttcttct

SEQ ID NO: 707 - DNA, 21 bp, Artificial Sequence
  Flt-1 target sequence
aaatgaaaaggtcttcttctg

SEQ ID NO: 708 - DNA, 21 bp, Artificial Sequence
  Flt-1 target sequence
aatgaaaaggtcttcttctga

SEQ ID NO: 709 - DNA, 21 bp, Artificial Sequence
  Flt-1 target sequence
aaaaggtcttcttctgaaata

SEQ ID NO: 710 - DNA, 21 bp, Artificial Sequence
  Flt-1 target sequence
aaaggtcttcttctgaaataa

SEQ ID NO: 711 - DNA, 21 bp, Artificial Sequence
  Flt-1 target sequence
aaggtcttcttctgaaataaa

SEQ ID NO: 712 - DNA, 21 bp, Artificial Sequence
  Flt-1 target sequence
aaataaagactgactacctat

SEQ ID NO: 713 - DNA, 21 bp, Artificial Sequence
  Flt-1 target sequence
aataaagactgactacctatc

SEQ ID NO: 714 - DNA, 21 bp, Artificial Sequence
  Flt-1 target sequence
aaagactgactacctatcaat

SEQ ID NO: 715 - DNA, 21 bp, Artificial Sequence
  Flt-1 target sequence
aagactgactacctatcaatt

SEQ ID NO: 716 - DNA, 21 bp, Artificial Sequence
  Flt-1 target sequence
aattataatggacccagatga

SEQ ID NO: 717 - DNA, 21 bp, Artificial Sequence
  Flt-1 target sequence
aatggacccagatgaagttcc

SEQ ID NO: 718 - DNA, 21 bp, Artificial Sequence
  Flt-1 target sequence
aagttcctttggatgagcagt

SEQ ID NO: 719 - DNA, 21 bp, Artificial Sequence
  Flt-1 target sequence
aagtgggagtttgcccgggag

SEQ ID NO: 720 - DNA, 21 bp, Artificial Sequence
  Flt-1 target sequence
aaactgggcaaatcacttgga

SEQ ID NO: 721 - DNA, 21 bp, Artificial Sequence
  Flt-1 target sequence
aactgggcaaatcacttggaa

SEQ ID NO: 722 - DNA, 21 bp, Artificial Sequence
  Flt-1 target sequence
aaatcacttggaagaggggct

SEQ ID NO: 723 - DNA, 21 bp, Artificial Sequence
  Flt-1 target sequence
aatcacttggaagaggggctt

SEQ ID NO: 724 - DNA, 21 bp, Artificial Sequence
  Flt-1 target sequence
aagaggggcttttggaaaagt

SEQ ID NO: 725 - DNA, 21 bp, Artificial Sequence
  Flt-1 target sequence
aaaagtggttcaagcatcagc

SEQ ID NO: 726 - DNA, 21 bp, Artificial Sequence
  Flt-1 target sequence
aaagtggttcaagcatcagca

SEQ ID NO: 727 - DNA, 21 bp, Artificial Sequence
  Flt-1 target sequence
aagtggttcaagcatcagcat

SEQ ID NO: 728 - DNA, 21 bp, Artificial Sequence
  Flt-1 target sequence
aagcatcagcatttggcatta

SEQ ID NO: 729 - DNA, 21 bp, Artificial Sequence
  Flt-1 target sequence
aagaaatcacctacgtgccgg

SEQ ID NO: 730 - DNA, 21 bp, Artificial Sequence
  Flt-1 target sequence
aaatcacctacgtgccggact

SEQ ID NO: 731 - DNA, 21 bp, Artificial Sequence
  Flt-1 target sequence
aatcacctacgtgccggactg

SEQ ID NO: 732 - DNA, 21 bp, Artificial Sequence
  Flt-1 target sequence
aaaatgctgaaagagggggcc

SEQ ID NO: 733 - DNA, 21 bp, Artificial Sequence
  Flt-1 target sequence
aaatgctgaaagagggggcca

SEQ ID NO: 734 - DNA, 21 bp, Artificial Sequence
  Flt-1 target sequence
aatgctgaaagagggggccac

SEQ ID NO: 735 - DNA, 21 bp, Artificial Sequence
  Flt-1 target sequence
aaagagggggccacggccagc

SEQ ID NO: 736 - DNA, 21 bp, Artificial Sequence
  Flt-1 target sequence
aagagggggccacggccagcg

SEQ ID NO: 737 - DNA, 21 bp, Artificial Sequence
  Flt-1 target sequence
aaagctctgatgactgagcta

SEQ ID NO: 738 - DNA, 21 bp, Artificial Sequence
  Flt-1 target sequence
aagctctgatgactgagctaa

SEQ ID NO: 739 - DNA, 21 bp, Artificial Sequence
  Flt-1 target sequence
aaaaatcttgacccacattgg

SEQ ID NO: 740 - DNA, 21 bp, Artificial Sequence
  Flt-1 target sequence
aaaatcttgacccacattggc

SEQ ID NO: 741 - DNA, 21 bp, Artificial Sequence
  Flt-1 target sequence
aaatcttgacccacattggcc

SEQ ID NO: 742 - DNA, 21 bp, Artificial Sequence
  Flt-1 target sequence
aatcttgacccacattggcca

SEQ ID NO: 743 - DNA, 21 bp, Artificial Sequence
  Flt-1 target sequence
aacgtggttaacctgctggga

SEQ ID NO: 744 - DNA, 21 bp, Artificial Sequence
  Flt-1 target sequence
aacctgctgggagcctgcacc

SEQ ID NO: 745 - DNA, 21 bp, Artificial Sequence
  Flt-1 target sequence
aagcaaggagggcctctgatg

SEQ ID NO: 746 - DNA, 21 bp, Artificial Sequence
  Flt-1 target sequence
aaggagggcctctgatggtga

SEQ ID NO: 747 - DNA, 21 bp, Artificial Sequence
  Flt-1 target sequence
aatactgcaaatatggaaatc

SEQ ID NO: 748 - DNA, 21 bp, Artificial Sequence
  Flt-1 target sequence
aaatatggaaatctctccaac

SEQ ID NO: 749 - DNA, 21 bp, Artificial Sequence
  Flt-1 target sequence
aatatggaaatctctccaact

SEQ ID NO: 750 - DNA, 21 bp, Artificial Sequence
  Flt-1 target sequence
aaatctctccaactacctcaa

SEQ ID NO: 751 - DNA, 21 bp, Artificial Sequence
  Flt-1 target sequence
aatctctccaactacctcaag

SEQ ID NO: 752 - DNA, 21 bp, Artificial Sequence
  Flt-1 target sequence
aactacctcaagagcaaacgt

SEQ ID NO: 753 - DNA, 21 bp, Artificial Sequence
  Flt-1 target sequence
aagagcaaacgtgacttattt

SEQ ID NO: 754 - DNA, 21 bp, Artificial Sequence
  Flt-1 target sequence
aaacgtgacttattttttctc

SEQ ID NO: 755 - DNA, 21 bp, Artificial Sequence
  Flt-1 target sequence
aacgtgacttattttttctca

SEQ ID NO: 756 - DNA, 21 bp, Artificial Sequence
  Flt-1 target sequence
aacaaggatgcagcactacac

SEQ ID NO: 757 - DNA, 21 bp, Artificial Sequence
  Flt-1 target sequence
aaggatgcagcactacacatg

SEQ ID NO: 758 - DNA, 21 bp, Artificial Sequence
  Flt-1 target sequence
aagaaagaaaaaatggagcca

SEQ ID NO: 759 - DNA, 21 bp, Artificial Sequence
  Flt-1 target sequence
aaagaaaaaatggagccaggc

SEQ ID NO: 760 - DNA, 21 bp, Artificial Sequence
  Flt-1 target sequence
aagaaaaaatggagccaggcc

SEQ ID NO: 761 - DNA, 21 bp, Artificial Sequence
  Flt-1 target sequence
aaaaaatggagccaggcctgg

SEQ ID NO: 762 - DNA, 21 bp, Artificial Sequence
  Flt-1 target sequence
aaaaatggagccaggcctgga

SEQ ID NO: 763 - DNA, 21 bp, Artificial Sequence
  Flt-1 target sequence
aaaatggagccaggcctggaa

SEQ ID NO: 764 - DNA, 21 bp, Artificial Sequence
  Flt-1 target sequence
aaatggagccaggcctggaac

SEQ ID NO: 765 - DNA, 21 bp, Artificial Sequence
  Flt-1 target sequence
aatggagccaggcctggaaca

SEQ ID NO: 766 - DNA, 21 bp, Artificial Sequence
  Flt-1 target sequence
aacaaggcaagaaaccaagac

SEQ ID NO: 767 - DNA, 21 bp, Artificial Sequence
  Flt-1 target sequence
aaggcaagaaaccaagactag

SEQ ID NO: 768 - DNA, 21 bp, Artificial Sequence
  Flt-1 target sequence
aagaaaccaagactagatagc

SEQ ID NO: 769 - DNA, 21 bp, Artificial Sequence
  Flt-1 target sequence
aaaccaagactagatagcgtc

SEQ ID NO: 770 - DNA, 21 bp, Artificial Sequence
  Flt-1 target sequence
aaccaagactagatagcgtca

SEQ ID NO: 771 - DNA, 21 bp, Artificial Sequence
  Flt-1 target sequence
aagactagatagcgtcaccag

SEQ ID NO: 772 - DNA, 21 bp, Artificial Sequence
  Flt-1 target sequence
aaagctttgcgagctccggct

SEQ ID NO: 773 - DNA, 20 bp, Artificial Sequence
  Flt-1 target sequence
aagctttgcgagctccggct

SEQ ID NO: 774 - DNA, 21 bp, Artificial Sequence
  Flt-1 target sequence
aagataaaagtctgagtgatg

SEQ ID NO: 775 - DNA, 21 bp, Artificial Sequence
  Flt-1 target sequence
aaaagtctgagtgatgttgag

SEQ ID NO: 776 - DNA, 21 bp, Artificial Sequence
  Flt-1 target sequence
aaagtctgagtgatgttgagg

SEQ ID NO: 777 - DNA, 21 bp, Artificial Sequence
  Flt-1 target sequence
aagtctgagtgatgttgagga

SEQ ID NO: 778 - DNA, 21 bp, Artificial Sequence
  Flt-1 target sequence
aagaggaggattctgacggtt

SEQ ID NO: 779 - DNA, 21 bp, Artificial Sequence
  Flt-1 target sequence
aaggagcccatcactatggaa

SEQ ID NO: 780 - DNA, 21 bp, Artificial Sequence
  Flt-1 target sequence
aagatctgatttcttacagtt

SEQ ID NO: 781 - DNA, 21 bp, Artificial Sequence
  Flt-1 target sequence
aagtggccagaggcatggagt

SEQ ID NO: 782 - DNA, 21 bp, Artificial Sequence
  Flt-1 target sequence
aaagtgcattcatcgggacct

SEQ ID NO: 783 - DNA, 21 bp, Artificial Sequence
  Flt-1 target sequence
aagtgcattcatcgggacctg

SEQ ID NO: 784 - DNA, 21 bp, Artificial Sequence
  Flt-1 target sequence
aaacattcttttatctgagaa

SEQ ID NO: 785 - DNA, 21 bp, Artificial Sequence
  Flt-1 target sequence
aacattcttttatctgagaac

SEQ ID NO: 786 - DNA, 21 bp, Artificial Sequence
  Flt-1 target sequence
aacaacgtggtgaagatttgt

SEQ ID NO: 787 - DNA, 21 bp, Artificial Sequence
  Flt-1 target sequence
aacgtggtgaagatttgtgat

SEQ ID NO: 788 - DNA, 21 bp, Artificial Sequence
  Flt-1 target sequence
aagatttgtgattttggcctt

SEQ ID NO: 789 - DNA, 21 bp, Artificial Sequence
  Flt-1 target sequence
aagaaccccgattatgtgaga

SEQ ID NO: 790 - DNA, 21 bp, Artificial Sequence
  Flt-1 target sequence
aaccccgattatgtgagaaaa

SEQ ID NO: 791 - DNA, 21 bp, Artificial Sequence
  Flt-1 target sequence
aaaaggagatactcgacttcc

SEQ ID NO: 792 - DNA, 21 bp, Artificial Sequence
  Flt-1 target sequence
aaaggagatactcgacttcct

SEQ ID NO: 793 - DNA, 21 bp, Artificial Sequence
  Flt-1 target sequence
aaggagatactcgacttcctc

SEQ ID NO: 794 - DNA, 21 bp, Artificial Sequence
  Flt-1 target sequence
aaatggatggctcctgaatct

SEQ ID NO: 795 - DNA, 21 bp, Artificial Sequence
  Flt-1 target sequence
aatggatggctcctgaatcta

SEQ ID NO: 796 - DNA, 21 bp, Artificial Sequence
  Flt-1 target sequence
aatctatctttgacaaaatct

SEQ ID NO: 797 - DNA, 21 bp, Artificial Sequence
  Flt-1 target sequence
aaaatctacagcaccaagagc

SEQ ID NO: 798 - DNA, 21 bp, Artificial Sequence
  Flt-1 target sequence
aaatctacagcaccaagagcg

SEQ ID NO: 799 - DNA, 21 bp, Artificial Sequence
  Flt-1 target sequence
aatctacagcaccaagagcga

SEQ ID NO: 800 - DNA, 21 bp, Artificial Sequence
  Flt-1 target sequence
aagagcgacgtgtggtcttac

SEQ ID NO: 801 - DNA, 21 bp, Artificial Sequence
  Flt-1 target sequence
aaatcttctccttaggtgggt

SEQ ID NO: 802 - DNA, 21 bp, Artificial Sequence
  Flt-1 target sequence
aatcttctccttaggtgggtc

SEQ ID NO: 803 - DNA, 21 bp, Artificial Sequence
  Flt-1 target sequence
aaatggatgaggacttttgca

SEQ ID NO: 804 - DNA, 21 bp, Artificial Sequence
  Flt-1 target sequence
aatggatgaggacttttgcag

SEQ ID NO: 805 - DNA, 21 bp, Artificial Sequence
  Flt-1 target sequence
aaggcatgaggatgagagctc

SEQ ID NO: 806 - DNA, 21 bp, Artificial Sequence
  Flt-1 target sequence
aaatctatcagatcatgctgg

SEQ ID NO: 807 - DNA, 21 bp, Artificial Sequence
  Flt-1 target sequence
aatctatcagatcatgctgga

SEQ ID NO: 808 - DNA, 21 bp, Artificial Sequence
  Flt-1 target sequence
aaaagaaaggccaagatttgc

SEQ ID NO: 809 - DNA, 21 bp, Artificial Sequence
  Flt-1 target sequence
aaagaaaggccaagatttgca

SEQ ID NO: 810 - DNA, 21 bp, Artificial Sequence
  Flt-1 target sequence
aagaaaggccaagatttgcag

SEQ ID NO: 811 - DNA, 21 bp, Artificial Sequence
  Flt-1 target sequence
aaaggccaagatttgcagaac

SEQ ID NO: 812 - DNA, 21 bp, Artificial Sequence
  Flt-1 target sequence
aaggccaagatttgcagaact

SEQ ID NO: 813 - DNA, 21 bp, Artificial Sequence
  Flt-1 target sequence
aagatttgcagaacttgtgga

SEQ ID NO: 814 - DNA, 21 bp, Artificial Sequence
  Flt-1 target sequence
aacttgtggaaaaactaggtg

SEQ ID NO: 815 - DNA, 21 bp, Artificial Sequence
  Flt-1 target sequence
aaaaactaggtgatttgcttc

SEQ ID NO: 816 - DNA, 21 bp, Artificial Sequence
  Flt-1 target sequence
aaaactaggtgatttgcttca

SEQ ID NO: 817 - DNA, 21 bp, Artificial Sequence
  Flt-1 target sequence
aaactaggtgatttgcttcaa

SEQ ID NO: 818 - DNA, 21 bp, Artificial Sequence
  Flt-1 target sequence
aactaggtgatttgcttcaag

SEQ ID NO: 819 - DNA, 21 bp, Artificial Sequence
  Flt-1 target sequence
aagcaaatgtacaacaggatg

SEQ ID NO: 820 - DNA, 21 bp, Artificial Sequence
  Flt-1 target sequence
aaatgtacaacaggatggtaa

SEQ ID NO: 821 - DNA, 21 bp, Artificial Sequence
  Flt-1 target sequence
aatgtacaacaggatggtaaa

SEQ ID NO: 822 - DNA, 21 bp, Artificial Sequence
  Flt-1 target sequence
aacaggatggtaaagactaca

SEQ ID NO: 823 - DNA, 21 bp, Artificial Sequence
  Flt-1 target sequence
aaagactacatcccaatcaat

SEQ ID NO: 824 - DNA, 21 bp, Artificial Sequence
  Flt-1 target sequence
aagactacatcccaatcaatg

SEQ ID NO: 825 - DNA, 21 bp, Artificial Sequence
  Flt-1 target sequence
aatcaatgccatactgacagg

SEQ ID NO: 826 - DNA, 21 bp, Artificial Sequence
  Flt-1 target sequence
aatgccatactgacaggaaat

SEQ ID NO: 827 - DNA, 21 bp, Artificial Sequence
  Flt-1 target sequence
aaatagtgggtttacatactc

SEQ ID NO: 828 - DNA, 21 bp, Artificial Sequence
  Flt-1 target sequence
aatagtgggtttacatactca

SEQ ID NO: 829 - DNA, 21 bp, Artificial Sequence
  Flt-1 target sequence
aactcctgccttctctgagga

SEQ ID NO: 830 - DNA, 21 bp, Artificial Sequence
  Flt-1 target sequence
aaggaaagtatttcagctccg

SEQ ID NO: 831 - DNA, 21 bp, Artificial Sequence
  Flt-1 target sequence
aaagtatttcagctccgaagt

SEQ ID NO: 832 - DNA, 21 bp, Artificial Sequence
  Flt-1 target sequence
aagtatttcagctccgaagtt

SEQ ID NO: 833 - DNA, 21 bp, Artificial Sequence
  Flt-1 target sequence
aagtttaattcaggaagctct

SEQ ID NO: 834 - DNA, 21 bp, Artificial Sequence
  Flt-1 target sequence
aattcaggaagctctgatgat

SEQ ID NO: 835 - DNA, 21 bp, Artificial Sequence
  Flt-1 target sequence
aagctctgatgatgtcagata

SEQ ID NO: 836 - DNA, 21 bp, Artificial Sequence
  Flt-1 target sequence
aaatgctttcaagttcatgag

SEQ ID NO: 837 - DNA, 21 bp, Artificial Sequence
  Flt-1 target sequence
aatgctttcaagttcatgagc

SEQ ID NO: 838 - DNA, 21 bp, Artificial Sequence
  Flt-1 target sequence
aagttcatgagcctggaaaga

SEQ ID NO: 839 - DNA, 21 bp, Artificial Sequence
  Flt-1 target sequence
aaagaatcaaaacctttgaag

SEQ ID NO: 840 - DNA, 21 bp, Artificial Sequence
  Flt-1 target sequence
aagaatcaaaacctttgaaga

SEQ ID NO: 841 - DNA, 21 bp, Artificial Sequence
  Flt-1 target sequence
aatcaaaacctttgaagaact

SEQ ID NO: 842 - DNA, 21 bp, Artificial Sequence
  Flt-1 target sequence
aaaacctttgaagaactttta

SEQ ID NO: 843 - DNA, 21 bp, Artificial Sequence
  Flt-1 target sequence
aaacctttgaagaacttttac

SEQ ID NO: 844 - DNA, 21 bp, Artificial Sequence
  Flt-1 target sequence
aacctttgaagaacttttacc

SEQ ID NO: 845 - DNA, 21 bp, Artificial Sequence
  Flt-1 target sequence
aagaacttttaccgaatgcca

SEQ ID NO: 846 - DNA, 21 bp, Artificial Sequence
  Flt-1 target sequence
aacttttaccgaatgccacct

SEQ ID NO: 847 - DNA, 21 bp, Artificial Sequence
  Flt-1 target sequence
aatgccacctccatgtttgat

SEQ ID NO: 848 - DNA, 21 bp, Artificial Sequence
  Flt-1 target sequence
aaacccaaggcctcgctcaag

SEQ ID NO: 849 - DNA, 21 bp, Artificial Sequence
  Flt-1 target sequence
aaacccaaggcctcgctcaag

SEQ ID NO: 850 - DNA, 21 bp, Artificial Sequence
  Flt-1 target sequence
aacccaaggcctcgctcaaga

SEQ ID NO: 851 - DNA, 21 bp, Artificial Sequence
  Flt-1 target sequence
aaggcctcgctcaagattgac

SEQ ID NO: 852 - DNA, 21 bp, Artificial Sequence
  Flt-1 target sequence
aagattgacttgagagtaacc

SEQ ID NO: 853 - DNA, 21 bp, Artificial Sequence
  Flt-1 target sequence
aaccagtaaaagtaaggagtc

SEQ ID NO: 854 - DNA, 21 bp, Artificial Sequence
  Flt-1 target sequence
aaaagtaaggagtcggggctg

SEQ ID NO: 855 - DNA, 21 bp, Artificial Sequence
  Flt-1 target sequence
aaagtaaggagtcggggctgt

SEQ ID NO: 856 - DNA, 21 bp, Artificial Sequence
  Flt-1 target sequence
aagtaaggagtcggggctgtc

SEQ ID NO: 857 - DNA, 21 bp, Artificial Sequence
  Flt-1 target sequence
aaggagtcggggctgtctgat

SEQ ID NO: 858 - DNA, 21 bp, Artificial Sequence
  Flt-1 target sequence
aaggcaagcgcaggttcacct

SEQ ID NO: 859 - DNA, 21 bp, Artificial Sequence
  Flt-1 target sequence
gcacccagcacatcatgcaag

SEQ ID NO: 860 - DNA, 21 bp, Artificial Sequence
  Flt-1 target sequence
ggctgagcataactaaatctg

SEQ ID NO: 861 - DNA, 21 bp, Artificial Sequence
  Flt-1 target sequence
gcttctacagctgcaaatatc

SEQ ID NO: 862 - DNA, 21 bp, Artificial Sequence
  Flt-1 target sequence
gagctcgtcattccctgccgg

SEQ ID NO: 863 - DNA, 21 bp, Artificial Sequence
  Flt-1 target sequence
ccaaagcaattcccatgccaa

SEQ ID NO: 864 - DNA, 21 bp, Artificial Sequence
  Flt-1 target sequence
tgctgagcataaaacagtcaa

SEQ ID NO: 865 - DNA, 21 bp, Artificial Sequence
  Flt-1 target sequence
ttgcatagcttccaataaagt

SEQ ID NO: 866 - DNA, 21 bp, Artificial Sequence
  Flt-1 target sequence
agtgatcacacagtggccatc

SEQ ID NO: 867 - DNA, 21 bp, Artificial Sequence
  Flt-1 target sequence
gatgaagttcctttggatgag

SEQ ID NO: 868 - DNA, 21 bp, Artificial Sequence
  Flt-1 target sequence
tacacatggagcctaagaaag

SEQ ID NO: 869 - DNA, 21 bp, Artificial Sequence
  Flt-1 target sequence
gagctccggctttcaggaaga

SEQ ID NO: 870 - DNA, 21 bp, Artificial Sequence
  Flt-1 target sequence
tctacagcaccaagagcgacg

SEQ ID NO: 871 - DNA, 21 bp, Artificial Sequence
  Flt-1 target sequence
tctgatgatgtcagatatgta

SEQ ID NO: 872 - DNA, 21 bp, Artificial Sequence
  Flt-1 target sequence
gcctcgctcaagattgacttg

SEQ ID NO: 873 - DNA, 21 bp, Artificial Sequence
  Flk-1/KDR-1 target sequence
aaaaagacatacttacaatta

SEQ ID NO: 874 - DNA, 21 bp, Artificial Sequence
  Flk-1/KDR-1 target sequence
aaaagacatacttacaattaa

SEQ ID NO: 875 - DNA, 21 bp, Artificial Sequence
  Flk-1/KDR-1 target sequence
aaagacatacttacaattaag

SEQ ID NO: 876 - DNA, 21 bp, Artificial Sequence
  Flk-1/KDR-1 target sequence
aagacatacttacaattaagg

SEQ ID NO: 877 - DNA, 21 bp, Artificial Sequence
  Flk-1/KDR-1 target sequence
aattaaggctaatacaactct

SEQ ID NO: 878 - DNA, 21 bp, Artificial Sequence
  Flk-1/KDR-1 target sequence
aaggctaatacaactcttcaa

SEQ ID NO: 879 - DNA, 21 bp, Artificial Sequence
  Flk-1/KDR-1 target sequence
aatacaactcttcaaattact

SEQ ID NO: 880 - DNA, 21 bp, Artificial Sequence
  Flk-1/KDR-1 target sequence
aactcttcaaattacttgcag

SEQ ID NO: 881 - DNA, 21 bp, Artificial Sequence
  Flk-1/KDR-1 target sequence
aaattacttgcaggggacaga

SEQ ID NO: 882 - DNA, 21 bp, Artificial Sequence
  Flk-1/KDR-1 target sequence
aattacttgcaggggacagag

SEQ ID NO: 883 - DNA, 21 bp, Artificial Sequence
  Flk-1/KDR-1 target sequence
aataatcagagtggcagtgag

SEQ ID NO: 884 - DNA, 21 bp, Artificial Sequence
  Flk-1/KDR-1 target sequence
aatcagagtggcagtgagcaa

SEQ ID NO: 885 - DNA, 21 bp, Artificial Sequence
  Flk-1/KDR-1 target sequence
aaagggtggaggtgactgagt

SEQ ID NO: 886 - DNA, 21 bp, Artificial Sequence
  Flk-1/KDR-1 target sequence
aagggtggaggtgactgagtg

SEQ ID NO: 887 - DNA, 21 bp, Artificial Sequence
  Flk-1/KDR-1 target sequence
aagacactcacaattccaaaa

SEQ ID NO: 888 - DNA, 21 bp, Artificial Sequence
  Flk-1/KDR-1 target sequence
aattccaaaagtgatcggaaa

SEQ ID NO: 889 - DNA, 21 bp, Artificial Sequence
  Flk-1/KDR-1 target sequence
aaaagtgatcggaaatgacac

SEQ ID NO: 890 - DNA, 21 bp, Artificial Sequence
  Flk-1/KDR-1 target sequence
aaagtgatcggaaatgacact

SEQ ID NO: 891 - DNA, 21 bp, Artificial Sequence
  Flk-1/KDR-1 target sequence
aagtgatcggaaatgacactg

SEQ ID NO: 892 - DNA, 21 bp, Artificial Sequence
  Flk-1/KDR-1 target sequence
aaatgacactggagcctacaa

SEQ ID NO: 893 - DNA, 21 bp, Artificial Sequence
  Flk-1/KDR-1 target sequence
aatgacactggagcctacaag

SEQ ID NO: 894 - DNA, 21 bp, Artificial Sequence
  Flk-1/KDR-1 target sequence
aagtgcttctaccgggaaact

SEQ ID NO: 895 - DNA, 21 bp, Artificial Sequence
  Flk-1/KDR-1 target sequence
aaactgacttggcctcggtca

SEQ ID NO: 896 - DNA, 21 bp, Artificial Sequence
  Flk-1/KDR-1 target sequence
aactgacttggcctcggtcat

SEQ ID NO: 897 - DNA, 21 bp, Artificial Sequence
  Flk-1/KDR-1 target sequence
aagattacagatctccattta

SEQ ID NO: 898 - DNA, 21 bp, Artificial Sequence
  Flk-1/KDR-1 target sequence
aacatggagtcgtgtacatta

SEQ ID NO: 899 - DNA, 21 bp, Artificial Sequence
  Flk-1/KDR-1 target sequence
aacaaaaacaaaactgtggtg

SEQ ID NO: 900 - DNA, 21 bp, Artificial Sequence
  Flk-1/KDR-1 target sequence
aaaaacaaaactgtggtgatt

SEQ ID NO: 901 - DNA, 21 bp, Artificial Sequence
  Flk-1/KDR-1 target sequence
aaaacaaaactgtggtgattc

SEQ ID NO: 902 - DNA, 21 bp, Artificial Sequence
  Flk-1/KDR-1 target sequence
aaacaaaactgtggtgattcc

SEQ ID NO: 903 - DNA, 21 bp, Artificial Sequence
  Flk-1/KDR-1 target sequence
aacaaaactgtggtgattcca

SEQ ID NO: 904 - DNA, 21 bp, Artificial Sequence
  Flk-1/KDR-1 target sequence
aaaactgtggtgattccatgt

SEQ ID NO: 905 - DNA, 21 bp, Artificial Sequence
  Flk-1/KDR-1 target sequence
aaactgtggtgattccatgtc

SEQ ID NO: 906 - DNA, 21 bp, Artificial Sequence
  Flk-1/KDR-1 target sequence
aactgtggtgattccatgtct

SEQ ID NO: 907 - DNA, 21 bp, Artificial Sequence
  Flk-1/KDR-1 target sequence
aaatctcaacgtgtcactttg

SEQ ID NO: 908 - DNA, 21 bp, Artificial Sequence
  Flk-1/KDR-1 target sequence
aatctcaacgtgtcactttgt

SEQ ID NO: 909 - DNA, 21 bp, Artificial Sequence
  Flk-1/KDR-1 target sequence
aacgtgtcactttgtgcaaga

SEQ ID NO: 910 - DNA, 21 bp, Artificial Sequence
  Flk-1/KDR-1 target sequence
aagatacccagaaaagagatt

SEQ ID NO: 911 - DNA, 21 bp, Artificial Sequence
  Flk-1/KDR-1 target sequence
aaaagagatttgttcctgatg

SEQ ID NO: 912 - DNA, 21 bp, Artificial Sequence
  Flk-1/KDR-1 target sequence
aaagagatttgttcctgatgg

SEQ ID NO: 913 - DNA, 21 bp, Artificial Sequence
  Flk-1/KDR-1 target sequence
aagagatttgttcctgatggt

SEQ ID NO: 914 - DNA, 21 bp, Artificial Sequence
  Flk-1/KDR-1 target sequence
aacagaatttcctgggacagc

SEQ ID NO: 915 - DNA, 21 bp, Artificial Sequence
  Flk-1/KDR-1 target sequence
aatttcctgggacagcaagaa

SEQ ID NO: 916 - DNA, 21 bp, Artificial Sequence
  Flk-1/KDR-1 target sequence
aagaagggctttactattccc

SEQ ID NO: 917 - DNA, 21 bp, Artificial Sequence
  Flk-1/KDR-1 target sequence
aagggctttactattcccagc

SEQ ID NO: 918 - DNA, 21 bp, Artificial Sequence
  Flk-1/KDR-1 target sequence
aagcaaaaattaatgatgaaa

SEQ ID NO: 919 - DNA, 21 bp, Artificial Sequence
  Flk-1/KDR-1 target sequence
aaaaattaatgatgaaagtta

SEQ ID NO: 920 - DNA, 21 bp, Artificial Sequence
  Flk-1/KDR-1 target sequence
aaaattaatgatgaaagttac

SEQ ID NO: 921 - DNA, 21 bp, Artificial Sequence
  Flk-1/KDR-1 target sequence
aaattaatgatgaaagttacc

SEQ ID NO: 922 - DNA, 21 bp, Artificial Sequence
  Flk-1/KDR-1 target sequence
aattaatgatgaaagttacca

SEQ ID NO: 923 - DNA, 21 bp, Artificial Sequence
  Flk-1/KDR-1 target sequence
aatgatgaaagttaccagtct

SEQ ID NO: 924 - DNA, 21 bp, Artificial Sequence
  Flk-1/KDR-1 target sequence
aaagttaccagtctattatgt

SEQ ID NO: 925 - DNA, 21 bp, Artificial Sequence
  Flk-1/KDR-1 target sequence
aagttaccagtctattatgta

SEQ ID NO: 926 - DNA, 21 bp, Artificial Sequence
  Flk-1/KDR-1 target sequence
aattgaactatctgttggaga

SEQ ID NO: 927 - DNA, 21 bp, Artificial Sequence
  Flk-1/KDR-1 target sequence
aactatctgttggagaaaagc

SEQ ID NO: 928 - DNA, 21 bp, Artificial Sequence
  Flk-1/KDR-1 target sequence
aaaagcttgtcttaaattgta

SEQ ID NO: 929 - DNA, 21 bp, Artificial Sequence
  Flk-1/KDR-1 target sequence
aaagcttgtcttaaattgtac

SEQ ID NO: 930 - DNA, 21 bp, Artificial Sequence
  Flk-1/KDR-1 target sequence
aagcttgtcttaaattgtaca

SEQ ID NO: 931 - DNA, 21 bp, Artificial Sequence
  Flk-1/KDR-1 target sequence
aaattgtacagcaagaactga

SEQ ID NO: 932 - DNA, 21 bp, Artificial Sequence
  Flk-1/KDR-1 target sequence
aattgtacagcaagaactgaa

SEQ ID NO: 933 - DNA, 21 bp, Artificial Sequence
  Flk-1/KDR-1 target sequence
aagaactgaactaaatgtggg

SEQ ID NO: 934 - DNA, 21 bp, Artificial Sequence
  Flk-1/KDR-1 target sequence
aactgaactaaatgtggggat

SEQ ID NO: 935 - DNA, 21 bp, Artificial Sequence
  Flk-1/KDR-1 target sequence
aactaaatgtggggattgact

SEQ ID NO: 936 - DNA, 21 bp, Artificial Sequence
  Flk-1/KDR-1 target sequence
aaatgtggggattgacttcaa

SEQ ID NO: 937 - DNA, 21 bp, Artificial Sequence
  Flk-1/KDR-1 target sequence
aatgtggggattgacttcaac

SEQ ID NO: 938 - DNA, 21 bp, Artificial Sequence
  Flk-1/KDR-1 target sequence
aactgggaatacccttcttcg

SEQ ID NO: 939 - DNA, 21 bp, Artificial Sequence
  Flk-1/KDR-1 target sequence
aatacccttcttcgaagcatc

SEQ ID NO: 940 - DNA, 21 bp, Artificial Sequence
  Flk-1/KDR-1 target sequence
aagcatcagcataagaaactt

SEQ ID NO: 941 - DNA, 21 bp, Artificial Sequence
  Flk-1/KDR-1 target sequence
aagaaacttgtaaaccgagac

SEQ ID NO: 942 - DNA, 21 bp, Artificial Sequence
  Flk-1/KDR-1 target sequence
aaacttgtaaaccgagaccta

SEQ ID NO: 943 - DNA, 21 bp, Artificial Sequence
  Flk-1/KDR-1 target sequence
aacttgtaaaccgagacctaa

SEQ ID NO: 944 - DNA, 21 bp, Artificial Sequence
  Flk-1/KDR-1 target sequence
aaaccgagacctaaaaaccca

SEQ ID NO: 945 - DNA, 21 bp, Artificial Sequence
  Flk-1/KDR-1 target sequence
aaccgagacctaaaaacccag

SEQ ID NO: 946 - DNA, 21 bp, Artificial Sequence
  Flk-1/KDR-1 target sequence
aaaaacccagtctgggagtga

SEQ ID NO: 947 - DNA, 21 bp, Artificial Sequence
  Flk-1/KDR-1 target sequence
aaaacccagtctgggagtgag

SEQ ID NO: 948 - DNA, 21 bp, Artificial Sequence
  Flk-1/KDR-1 target sequence
aaacccagtctgggagtgaga

SEQ ID NO: 949 - DNA, 21 bp, Artificial Sequence
  Flk-1/KDR-1 target sequence
aacccagtctgggagtgagat

SEQ ID NO: 950 - DNA, 21 bp, Artificial Sequence
  Flk-1/KDR-1 target sequence
aagaaatttttgagcacctta

SEQ ID NO: 951 - DNA, 21 bp, Artificial Sequence
  Flk-1/KDR-1 target sequence
aaatttttgagcaccttaact

SEQ ID NO: 952 - DNA, 21 bp, Artificial Sequence
  Flk-1/KDR-1 target sequence
aatttttgagcaccttaacta

SEQ ID NO: 953 - DNA, 21 bp, Artificial Sequence
  Flk-1/KDR-1 target sequence
aactatagatggtgtaacccg

SEQ ID NO: 954 - DNA, 21 bp, Artificial Sequence
  Flk-1/KDR-1 target sequence
aacccggagtgaccaaggatt

SEQ ID NO: 955 - DNA, 21 bp, Artificial Sequence
  Flk-1/KDR-1 target sequence
aaggattgtacacctgtgcag

SEQ ID NO: 956 - DNA, 21 bp, Artificial Sequence
  Flk-1/KDR-1 target sequence
aagaagaacagcacatttgtc

SEQ ID NO: 957 - DNA, 21 bp, Artificial Sequence
  Flk-1/KDR-1 target sequence
aagaacagcacatttgtcagg

SEQ ID NO: 958 - DNA, 21 bp, Artificial Sequence
  Flk-1/KDR-1 target sequence
aacagcacatttgtcagggtc

SEQ ID NO: 959 - DNA, 21 bp, Artificial Sequence
  Flk-1/KDR-1 target sequence
aaaaaccttttgttgcttttg

SEQ ID NO: 960 - DNA, 21 bp, Artificial Sequence
  Flk-1/KDR-1 target sequence
aaaaccttttgttgcttttgg

SEQ ID NO: 961 - DNA, 21 bp, Artificial Sequence
  Flk-1/KDR-1 target sequence
aaaccttttgttgcttttgga

SEQ ID NO: 962 - DNA, 21 bp, Artificial Sequence
  Flk-1/KDR-1 target sequence
aaccttttgttgcttttggaa

SEQ ID NO: 963 - DNA, 21 bp, Artificial Sequence
  Flk-1/KDR-1 target sequence
aagtggcatggaatctctggt

SEQ ID NO: 964 - DNA, 21 bp, Artificial Sequence
  Flk-1/KDR-1 target sequence
aatctctggtggaagccacgg

SEQ ID NO: 965 - DNA, 21 bp, Artificial Sequence
  Flk-1/KDR-1 target sequence
aagccacggtgggggagcgtg

SEQ ID NO: 966 - DNA, 21 bp, Artificial Sequence
  Flk-1/KDR-1 target sequence
aatccctgcgaagtaccttgg

SEQ ID NO: 967 - DNA, 21 bp, Artificial Sequence
  Flk-1/KDR-1 target sequence
aagtaccttggttacccaccc

SEQ ID NO: 968 - DNA, 21 bp, Artificial Sequence
  Flk-1/KDR-1 target sequence
aaataaaatggtataaaaatg

SEQ ID NO: 969 - DNA, 21 bp, Artificial Sequence
  Flk-1/KDR-1 target sequence
aataaaatggtataaaaatgg

SEQ ID NO: 970 - DNA, 21 bp, Artificial Sequence
  Flk-1/KDR-1 target sequence
aaaatggtataaaaatggaat

SEQ ID NO: 971 - DNA, 21 bp, Artificial Sequence
  Flk-1/KDR-1 target sequence
aaatggtataaaaatggaata

SEQ ID NO: 972 - DNA, 21 bp, Artificial Sequence
  Flk-1/KDR-1 target sequence
aatggtataaaaatggaatac

SEQ ID NO: 973 - DNA, 21 bp, Artificial Sequence
  Flk-1/KDR-1 target sequence
aaaaatggaataccccttgag

SEQ ID NO: 974 - DNA, 21 bp, Artificial Sequence
  Flk-1/KDR-1 target sequence
aaaatggaataccccttgagt

SEQ ID NO: 975 - DNA, 21 bp, Artificial Sequence
  Flk-1/KDR-1 target sequence
aaatggaataccccttgagtc

SEQ ID NO: 976 - DNA, 21 bp, Artificial Sequence
  Flk-1/KDR-1 target sequence
aatggaataccccttgagtcc

SEQ ID NO: 977 - DNA, 21 bp, Artificial Sequence
  Flk-1/KDR-1 target sequence
aataccccttgagtccaatca

SEQ ID NO: 978 - DNA, 21 bp, Artificial Sequence
  Flk-1/KDR-1 target sequence
aatcacacaattaaagcgggg

SEQ ID NO: 979 - DNA, 21 bp, Artificial Sequence
  Flk-1/KDR-1 target sequence
aattaaagcggggcatgtact

SEQ ID NO: 980 - DNA, 21 bp, Artificial Sequence
  Flk-1/KDR-1 target sequence
aaagcggggcatgtactgacg

SEQ ID NO: 981 - DNA, 21 bp, Artificial Sequence
  Flk-1/KDR-1 target sequence
aagcggggcatgtactgacga

SEQ ID NO: 982 - DNA, 21 bp, Artificial Sequence
  Flk-1/KDR-1 target sequence
aagtgagtgaaagagacacag

SEQ ID NO: 983 - DNA, 21 bp, Artificial Sequence
  Flk-1/KDR-1 target sequence
aaagagacacaggaaattaca

SEQ ID NO: 984 - DNA, 21 bp, Artificial Sequence
  Flk-1/KDR-1 target sequence
aagagacacaggaaattacac

SEQ ID NO: 985 - DNA, 21 bp, Artificial Sequence
  Flk-1/KDR-1 target sequence
aaattacactgtcatccttac

SEQ ID NO: 986 - DNA, 21 bp, Artificial Sequence
  Flk-1/KDR-1 target sequence
aattacactgtcatccttacc

SEQ ID NO: 987 - DNA, 21 bp, Artificial Sequence
  Flk-1/KDR-1 target sequence
aatcccatttcaaaggagaag

SEQ ID NO: 988 - DNA, 21 bp, Artificial Sequence
  Flk-1/KDR-1 target sequence
aaaggagaagcagagccatgt

SEQ ID NO: 989 - DNA, 21 bp, Artificial Sequence
  Flk-1/KDR-1 target sequence
aaggagaagcagagccatgtg

SEQ ID NO: 990 - DNA, 21 bp, Artificial Sequence
  Flk-1/KDR-1 target sequence
aagcagagccatgtggtctct

SEQ ID NO: 991 - DNA, 21 bp, Artificial Sequence
  Flk-1/KDR-1 target sequence
aaatctctaatctctcctgtg

SEQ ID NO: 992 - DNA, 21 bp, Artificial Sequence
  Flk-1/KDR-1 target sequence
aatctctaatctctcctgtgg

SEQ ID NO: 993 - DNA, 21 bp, Artificial Sequence
  Flk-1/KDR-1 target sequence
aatctctcctgtggattccta

SEQ ID NO: 994 - DNA, 21 bp, Artificial Sequence
  Flk-1/KDR-1 target sequence
aaacgctgacatgtacggtct

SEQ ID NO: 995 - DNA, 21 bp, Artificial Sequence
  Flk-1/KDR-1 target sequence
aacgctgacatgtacggtcta

SEQ ID NO: 996 - DNA, 21 bp, Artificial Sequence
  Flk-1/KDR-1 target sequence
aagagtgcgccaacgagccca

SEQ ID NO: 997 - DNA, 21 bp, Artificial Sequence
  Flk-1/KDR-1 target sequence
aacgagcccagccaagctgtc

SEQ ID NO: 998 - DNA, 21 bp, Artificial Sequence
  Flk-1/KDR-1 target sequence
aagctgtctcagtgacaaacc

SEQ ID NO: 999 - DNA, 21 bp, Artificial Sequence
  Flk-1/KDR-1 target sequence
aaacccatacccttgtgaaga

SEQ ID NO: 1000 - DNA, 21 bp, Artificial Sequence
  Flk-1/KDR-1 target sequence
aacccatacccttgtgaagaa

SEQ ID NO: 1001 - DNA, 21 bp, Artificial Sequence
  Flk-1/KDR-1 target sequence
aagaatggagaagtgtggagg

SEQ ID NO: 1002 - DNA, 21 bp, Artificial Sequence
  Flk-1/KDR-1 target sequence
aatggagaagtgtggaggact

SEQ ID NO: 1003 - DNA, 21 bp, Artificial Sequence
  Flk-1/KDR-1 target sequence
aagtgtggaggacttccaggg

SEQ ID NO: 1004 - DNA, 21 bp, Artificial Sequence
  Flk-1/KDR-1 target sequence
aaataaaattgaagttaataa

SEQ ID NO: 1005 - DNA, 21 bp, Artificial Sequence
  Flk-1/KDR-1 target sequence
aataaaattgaagttaataaa

SEQ ID NO: 1006 - DNA, 21 bp, Artificial Sequence
  Flk-1/KDR-1 target sequence
aaaattgaagttaataaaaat

SEQ ID NO: 1007 - DNA, 21 bp, Artificial Sequence
  Flk-1/KDR-1 target sequence
aaattgaagttaataaaaatc

SEQ ID NO: 1008 - DNA, 21 bp, Artificial Sequence
  Flk-1/KDR-1 target sequence
aattgaagttaataaaaatca

SEQ ID NO: 1009 - DNA, 21 bp, Artificial Sequence
  Flk-1/KDR-1 target sequence
aagttaataaaaatcaatttg

SEQ ID NO: 1010 - DNA, 21 bp, Artificial Sequence
  Flk-1/KDR-1 target sequence
aataaaaatcaatttgctcta

SEQ ID NO: 1011 - DNA, 21 bp, Artificial Sequence
  Flk-1/KDR-1 target sequence
aaaaatcaatttgctctaatt

SEQ ID NO: 1012 - DNA, 21 bp, Artificial Sequence
  Flk-1/KDR-1 target sequence
aaaatcaatttgctctaattg

SEQ ID NO: 1013 - DNA, 21 bp, Artificial Sequence
  Flk-1/KDR-1 target sequence
aaatcaatttgctctaattga

SEQ ID NO: 1014 - DNA, 21 bp, Artificial Sequence
  Flk-1/KDR-1 target sequence
aatcaatttgctctaattgaa

SEQ ID NO: 1015 - DNA, 21 bp, Artificial Sequence
  Flk-1/KDR-1 target sequence
aatttgctctaattgaaggaa

SEQ ID NO: 1016 - DNA, 21 bp, Artificial Sequence
  Flk-1/KDR-1 target sequence
aattgaaggaaaaaacaaaac

SEQ ID NO: 1017 - DNA, 21 bp, Artificial Sequence
  Flk-1/KDR-1 target sequence
aaggaaaaaacaaaactgtaa

SEQ ID NO: 1018 - DNA, 21 bp, Artificial Sequence
  Flk-1/KDR-1 target sequence
aaaaaacaaaactgtaagtac

SEQ ID NO: 1019 - DNA, 21 bp, Artificial Sequence
  Flk-1/KDR-1 target sequence
aaaaacaaaactgtaagtacc

SEQ ID NO: 1020 - DNA, 21 bp, Artificial Sequence
  Flk-1/KDR-1 target sequence
aaaacaaaactgtaagtaccc

SEQ ID NO: 1021 - DNA, 21 bp, Artificial Sequence
  Flk-1/KDR-1 target sequence
aaacaaaactgtaagtaccct

SEQ ID NO: 1022 - DNA, 21 bp, Artificial Sequence
  Flk-1/KDR-1 target sequence
aacaaaactgtaagtaccctt

SEQ ID NO: 1023 - DNA, 21 bp, Artificial Sequence
  Flk-1/KDR-1 target sequence
aaaactgtaagtacccttgtt

SEQ ID NO: 1024 - DNA, 21 bp, Artificial Sequence
  Flk-1/KDR-1 target sequence
aaactgtaagtacccttgtta

SEQ ID NO: 1025 - DNA, 21 bp, Artificial Sequence
  Flk-1/KDR-1 target sequence
aactgtaagtacccttgttat

SEQ ID NO: 1026 - DNA, 21 bp, Artificial Sequence
  Flk-1/KDR-1 target sequence
aagtacccttgttatccaagc

SEQ ID NO: 1027 - DNA, 21 bp, Artificial Sequence
  Flk-1/KDR-1 target sequence
aagcggcaaatgtgtcagctt

SEQ ID NO: 1028 - DNA, 21 bp, Artificial Sequence
  Flk-1/KDR-1 target sequence
aaatgtgtcagctttgtacaa

SEQ ID NO: 1029 - DNA, 21 bp, Artificial Sequence
  Flk-1/KDR-1 target sequence
aatgtgtcagctttgtacaaa

SEQ ID NO: 1030 - DNA, 21 bp, Artificial Sequence
  Flk-1/KDR-1 target sequence
aaatgtgaagcggtcaacaaa

SEQ ID NO: 1031 - DNA, 21 bp, Artificial Sequence
  Flk-1/KDR-1 target sequence
aatgtgaagcggtcaacaaag

SEQ ID NO: 1032 - DNA, 21 bp, Artificial Sequence
  Flk-1/KDR-1 target sequence
aagcggtcaacaaagtcggga

SEQ ID NO: 1033 - DNA, 21 bp, Artificial Sequence
  Flk-1/KDR-1 target sequence
aacaaagtcgggagaggagag

SEQ ID NO: 1034 - DNA, 21 bp, Artificial Sequence
  Flk-1/KDR-1 target sequence
aaagtcgggagaggagagagg

SEQ ID NO: 1035 - DNA, 21 bp, Artificial Sequence
  Flk-1/KDR-1 target sequence
aagtcgggagaggagagaggg

SEQ ID NO: 1036 - DNA, 21 bp, Artificial Sequence
  Flk-1/KDR-1 target sequence
aaattactttgcaacctgaca

SEQ ID NO: 1037 - DNA, 21 bp, Artificial Sequence
  Flk-1/KDR-1 target sequence
aattactttgcaacctgacat

SEQ ID NO: 1038 - DNA, 21 bp, Artificial Sequence
  Flk-1/KDR-1 target sequence
aacctgacatgcagcccactg

SEQ ID NO: 1039 - DNA, 21 bp, Artificial Sequence
  Flk-1/KDR-1 target sequence
aacctcacatggtacaagctt

SEQ ID NO: 1040 - DNA, 21 bp, Artificial Sequence
  Flk-1/KDR-1 target sequence
aagcttggcccacagcctctg

SEQ ID NO: 1041 - DNA, 21 bp, Artificial Sequence
  Flk-1/KDR-1 target sequence
aatccatgtgggagagttgcc

SEQ ID NO: 1042 - DNA, 21 bp, Artificial Sequence
  Flk-1/KDR-1 target sequence
aagaacttggatactctttgg

SEQ ID NO: 1043 - DNA, 21 bp, Artificial Sequence
  Flk-1/KDR-1 target sequence
aacttggatactctttggaaa

SEQ ID NO: 1044 - DNA, 21 bp, Artificial Sequence
  Flk-1/KDR-1 target sequence
aaattgaatgccaccatgttc

SEQ ID NO: 1045 - DNA, 21 bp, Artificial Sequence
  Flk-1/KDR-1 target sequence
aattgaatgccaccatgttct

SEQ ID NO: 1046 - DNA, 21 bp, Artificial Sequence
  Flk-1/KDR-1 target sequence
aatgccaccatgttctctaat

SEQ ID NO: 1047 - DNA, 21 bp, Artificial Sequence
  Flk-1/KDR-1 target sequence
aatagcacaaatgacattttg

SEQ ID NO: 1048 - DNA, 21 bp, Artificial Sequence
  Flk-1/KDR-1 target sequence
aaatgacattttgatcatgga

SEQ ID NO: 1049 - DNA, 21 bp, Artificial Sequence
  Flk-1/KDR-1 target sequence
aatgacattttgatcatggag

SEQ ID NO: 1050 - DNA, 21 bp, Artificial Sequence
  Flk-1/KDR-1 target sequence
aagaatgcatccttgcaggac

SEQ ID NO: 1051 - DNA, 21 bp, Artificial Sequence
  Flk-1/KDR-1 target sequence
aatgcatccttgcaggaccaa

SEQ ID NO: 1052 - DNA, 21 bp, Artificial Sequence
  Flk-1/KDR-1 target sequence
aaggagactatgtctgccttg

SEQ ID NO: 1053 - DNA, 21 bp, Artificial Sequence
  Flk-1/KDR-1 target sequence
aagacaggaagaccaagaaaa

SEQ ID NO: 1054 - DNA, 21 bp, Artificial Sequence
  Flk-1/KDR-1 target sequence
aagaccaagaaaagacattgc

SEQ ID NO: 1055 - DNA, 21 bp, Artificial Sequence
  Flk-1/KDR-1 target sequence
aagaaaagacattgcgtggtc

SEQ ID NO: 1056 - DNA, 21 bp, Artificial Sequence
  Flk-1/KDR-1 target sequence
aaaagacattgcgtggtcagg

SEQ ID NO: 1057 - DNA, 21 bp, Artificial Sequence
  Flk-1/KDR-1 target sequence
aaagacattgcgtggtcaggc

SEQ ID NO: 1058 - DNA, 21 bp, Artificial Sequence
  Flk-1/KDR-1 target sequence
aagacattgcgtggtcaggca

SEQ ID NO: 1059 - DNA, 21 bp, Artificial Sequence
  Flk-1/KDR-1 target sequence
aaacctggagaatcagacgac

SEQ ID NO: 1060 - DNA, 21 bp, Artificial Sequence
  Flk-1/KDR-1 target sequence
aacctggagaatcagacgaca

SEQ ID NO: 1061 - DNA, 21 bp, Artificial Sequence
  Flk-1/KDR-1 target sequence
aatcagacgacaagtattggg

SEQ ID NO: 1062 - DNA, 21 bp, Artificial Sequence
  Flk-1/KDR-1 target sequence
aagtattggggaaagcatcga

SEQ ID NO: 1063 - DNA, 21 bp, Artificial Sequence
  Flk-1/KDR-1 target sequence
aaagcatcgaagtctcatgca

SEQ ID NO: 1064 - DNA, 21 bp, Artificial Sequence
  Flk-1/KDR-1 target sequence
aagcatcgaagtctcatgcac

SEQ ID NO: 1065 - DNA, 21 bp, Artificial Sequence
  Flk-1/KDR-1 target sequence
aatccccctccacagatcatg

SEQ ID NO: 1066 - DNA, 21 bp, Artificial Sequence
  Flk-1/KDR-1 target sequence
aaagataatgagacccttgta

SEQ ID NO: 1067 - DNA, 21 bp, Artificial Sequence
  Flk-1/KDR-1 target sequence
aagataatgagacccttgtag

SEQ ID NO: 1068 - DNA, 21 bp, Artificial Sequence
  Flk-1/KDR-1 target sequence
aatgagacccttgtagaagac

SEQ ID NO: 1069 - DNA, 21 bp, Artificial Sequence
  Flk-1/KDR-1 target sequence
aagactcaggcattgtattga

SEQ ID NO: 1070 - DNA, 21 bp, Artificial Sequence
  Flk-1/KDR-1 target sequence
aaggatgggaaccggaacctc

SEQ ID NO: 1071 - DNA, 21 bp, Artificial Sequence
  Flk-1/KDR-1 target sequence
aaccggaacctcactatccgc

SEQ ID NO: 1072 - DNA, 21 bp, Artificial Sequence
  Flk-1/KDR-1 target sequence
aacctcactatccgcagagtg

SEQ ID NO: 1073 - DNA, 21 bp, Artificial Sequence
  Flk-1/KDR-1 target sequence
aaggaggacgaaggcctctac

SEQ ID NO: 1074 - DNA, 21 bp, Artificial Sequence
  Flk-1/KDR-1 target sequence
aaggcctctacacctgccagg

SEQ ID NO: 1075 - DNA, 21 bp, Artificial Sequence
  Flk-1/KDR-1 target sequence
aaaagtggaggcatttttcat

SEQ ID NO: 1076 - DNA, 21 bp, Artificial Sequence
  Flk-1/KDR-1 target sequence
aaagtggaggcatttttcata

SEQ ID NO: 1077 - DNA, 21 bp, Artificial Sequence
  Flk-1/KDR-1 target sequence
aagtggaggcatttttcataa

SEQ ID NO: 1078 - DNA, 21 bp, Artificial Sequence
  Flk-1/KDR-1 target sequence
aatagaaggtgcccaggaaaa

SEQ ID NO: 1079 - DNA, 21 bp, Artificial Sequence
  Flk-1/KDR-1 target sequence
aaggtgcccaggaaaagacga

SEQ ID NO: 1080 - DNA, 21 bp, Artificial Sequence
  Flk-1/KDR-1 target sequence
aaaagacgaacttggaaatca

SEQ ID NO: 1081 - DNA, 21 bp, Artificial Sequence
  Flk-1/KDR-1 target sequence
aaagacgaacttggaaatcat

SEQ ID NO: 1082 - DNA, 21 bp, Artificial Sequence
  Flk-1/KDR-1 target sequence
aagacgaacttggaaatcatt

SEQ ID NO: 1083 - DNA, 21 bp, Artificial Sequence
  Flk-1/KDR-1 target sequence
aacttggaaatcattattcta

SEQ ID NO: 1084 - DNA, 21 bp, Artificial Sequence
  Flk-1/KDR-1 target sequence
aaatcattattctagtaggca

SEQ ID NO: 1085 - DNA, 21 bp, Artificial Sequence
  Flk-1/KDR-1 target sequence
aatcattattctagtaggcac

SEQ ID NO: 1086 - DNA, 21 bp, Artificial Sequence
  Flk-1/KDR-1 target sequence
aagcgggccaatggaggggaa

SEQ ID NO: 1087 - DNA, 21 bp, Artificial Sequence
  Flk-1/KDR-1 target sequence
aatggaggggaactgaagaca

SEQ ID NO: 1088 - DNA, 21 bp, Artificial Sequence
  Flk-1/KDR-1 target sequence
aactgaagacaggctacttgt

SEQ ID NO: 1089 - DNA, 21 bp, Artificial Sequence
  Flk-1/KDR-1 target sequence
aagacaggctacttgtccatc

SEQ ID NO: 1090 - DNA, 21 bp, Artificial Sequence
  Flk-1/KDR-1 target sequence
aactcccattggatgaacatt

SEQ ID NO: 1091 - DNA, 21 bp, Artificial Sequence
  Flk-1/KDR-1 target sequence
aacattgtgaacgactgcctt

SEQ ID NO: 1092 - DNA, 21 bp, Artificial Sequence
  Flk-1/KDR-1 target sequence
aacgactgccttatgatgcca

SEQ ID NO: 1093 - DNA, 21 bp, Artificial Sequence
  Flk-1/KDR-1 target sequence
aaatgggaattccccagagac

SEQ ID NO: 1094 - DNA, 21 bp, Artificial Sequence
  Flk-1/KDR-1 target sequence
aatgggaattccccagagacc

SEQ ID NO: 1095 - DNA, 21 bp, Artificial Sequence
  Flk-1/KDR-1 target sequence
aattccccagagaccggctga

SEQ ID NO: 1096 - DNA, 21 bp, Artificial Sequence
  Flk-1/KDR-1 target sequence
aagctaggtaagcctcttggc

SEQ ID NO: 1097 - DNA, 21 bp, Artificial Sequence
  Flk-1/KDR-1 target sequence
aagcctcttggccgtggtgcc

SEQ ID NO: 1098 - DNA, 21 bp, Artificial Sequence
  Flk-1/KDR-1 target sequence
aagtgattgaagcagatgcct

SEQ ID NO: 1099 - DNA, 21 bp, Artificial Sequence
  Flk-1/KDR-1 target sequence
aagcagatgcctttggaattg

SEQ ID NO: 1100 - DNA, 21 bp, Artificial Sequence
  Flk-1/KDR-1 target sequence
aattgacaagacagcaacttg

SEQ ID NO: 1101 - DNA, 21 bp, Artificial Sequence
  Flk-1/KDR-1 target sequence
aagacagcaacttgcaggaca

SEQ ID NO: 1102 - DNA, 21 bp, Artificial Sequence
  Flk-1/KDR-1 target sequence
aacttgcaggacagtagcagt

SEQ ID NO: 1103 - DNA, 21 bp, Artificial Sequence
  Flk-1/KDR-1 target sequence
aaaatgttgaaagaaggagca

SEQ ID NO: 1104 - DNA, 21 bp, Artificial Sequence
  Flk-1/KDR-1 target sequence
aaatgttgaaagaaggagcaa

SEQ ID NO: 1105 - DNA, 21 bp, Artificial Sequence
  Flk-1/KDR-1 target sequence
aatgttgaaagaaggagcaac

SEQ ID NO: 1106 - DNA, 21 bp, Artificial Sequence
  Flk-1/KDR-1 target sequence
aaagaaggagcaacacacagt

SEQ ID NO: 1107 - DNA, 21 bp, Artificial Sequence
  Flk-1/KDR-1 target sequence
aagaaggagcaacacacagtg

SEQ ID NO: 1108 - DNA, 21 bp, Artificial Sequence
  Flk-1/KDR-1 target sequence
aaggagcaacacacagtgagc

SEQ ID NO: 1109 - DNA, 21 bp, Artificial Sequence
  Flk-1/KDR-1 target sequence
aacacacagtgagcatcgagc

SEQ ID NO: 1110 - DNA, 21 bp, Artificial Sequence
  Flk-1/KDR-1 target sequence
aactcaagatcctcattcata

SEQ ID NO: 1111 - DNA, 21 bp, Artificial Sequence
  Flk-1/KDR-1 target sequence
aagatcctcattcatattggt

SEQ ID NO: 1112 - DNA, 21 bp, Artificial Sequence
  Flk-1/KDR-1 target sequence
aatgtggtcaaccttctaggt

SEQ ID NO: 1113 - DNA, 21 bp, Artificial Sequence
  Flk-1/KDR-1 target sequence
aaccttctaggtgcctgtacc

SEQ ID NO: 1114 - DNA, 21 bp, Artificial Sequence
  Flk-1/KDR-1 target sequence
aagccaggagggccactcatg

SEQ ID NO: 1115 - DNA, 21 bp, Artificial Sequence
  Flk-1/KDR-1 target sequence
aattctgcaaatttggaaacc

SEQ ID NO: 1116 - DNA, 21 bp, Artificial Sequence
  Flk-1/KDR-1 target sequence
aaatttggaaacctgtccact

SEQ ID NO: 1117 - DNA, 21 bp, Artificial Sequence
  Flk-1/KDR-1 target sequence
aatttggaaacctgtccactt

SEQ ID NO: 1118 - DNA, 21 bp, Artificial Sequence
  Flk-1/KDR-1 target sequence
aaacctgtccacttacctgag

SEQ ID NO: 1119 - DNA, 21 bp, Artificial Sequence
  Flk-1/KDR-1 target sequence
aacctgtccacttacctgagg

SEQ ID NO: 1120 - DNA, 21 bp, Artificial Sequence
  Flk-1/KDR-1 target sequence
aagagaaatgaatttgtcccc

SEQ ID NO: 1121 - DNA, 21 bp, Artificial Sequence
  Flk-1/KDR-1 target sequence
aaatgaatttgtcccctacaa

SEQ ID NO: 1122 - DNA, 21 bp, Artificial Sequence
  Flk-1/KDR-1 target sequence
aatgaatttgtcccctacaag

SEQ ID NO: 1123 - DNA, 21 bp, Artificial Sequence
  Flk-1/KDR-1 target sequence
aatttgtcccctacaagacca

SEQ ID NO: 1124 - DNA, 21 bp, Artificial Sequence
  Flk-1/KDR-1 target sequence
aagaccaaaggggcacgattc

SEQ ID NO: 1125 - DNA, 21 bp, Artificial Sequence
  Flk-1/KDR-1 target sequence
aaaggggcacgattccgtcaa

SEQ ID NO: 1126 - DNA, 21 bp, Artificial Sequence
  Flk-1/KDR-1 target sequence
aaggggcacgattccgtcaag

SEQ ID NO: 1127 - DNA, 21 bp, Artificial Sequence
  Flk-1/KDR-1 target sequence
aagggaaagactacgttggag

SEQ ID NO: 1128 - DNA, 21 bp, Artificial Sequence
  Flk-1/KDR-1 target sequence
aaagactacgttggagcaatc

SEQ ID NO: 1129 - DNA, 21 bp, Artificial Sequence
  Flk-1/KDR-1 target sequence
aagactacgttggagcaatcc

SEQ ID NO: 1130 - DNA, 21 bp, Artificial Sequence
  Flk-1/KDR-1 target sequence
aatccctgtggatctgaaacg

SEQ ID NO: 1131 - DNA, 21 bp, Artificial Sequence
  Flk-1/KDR-1 target sequence
aaacggcgcttggacagcatc

SEQ ID NO: 1132 - DNA, 21 bp, Artificial Sequence
  Flk-1/KDR-1 target sequence
aacggcgcttggacagcatca

SEQ ID NO: 1133 - DNA, 21 bp, Artificial Sequence
  Flk-1/KDR-1 target sequence
aagtccctcagtgatgtagaa

SEQ ID NO: 1134 - DNA, 21 bp, Artificial Sequence
  Flk-1/KDR-1 target sequence
aagaagaggaagctcctgaag

SEQ ID NO: 1135 - DNA, 21 bp, Artificial Sequence
  Flk-1/KDR-1 target sequence
aagaggaagctcctgaagatc

SEQ ID NO: 1136 - DNA, 21 bp, Artificial Sequence
  Flk-1/KDR-1 target sequence
aagctcctgaagatctgtata

SEQ ID NO: 1137 - DNA, 21 bp, Artificial Sequence
  Flk-1/KDR-1 target sequence
aagatctgtataaggacttcc

SEQ ID NO: 1138 - DNA, 21 bp, Artificial Sequence
  Flk-1/KDR-1 target sequence
aaggacttcctgaccttggag

SEQ ID NO: 1139 - DNA, 21 bp, Artificial Sequence
  Flk-1/KDR-1 target sequence
aagtggctaagggcatggagt

SEQ ID NO: 1140 - DNA, 21 bp, Artificial Sequence
  Flk-1/KDR-1 target sequence
aagggcatggagttcttggca

SEQ ID NO: 1141 - DNA, 21 bp, Artificial Sequence
  Flk-1/KDR-1 target sequence
aaagtgtatccacagggacct

SEQ ID NO: 1142 - DNA, 21 bp, Artificial Sequence
  Flk-1/KDR-1 target sequence
aagtgtatccacagggacctg

SEQ ID NO: 1143 - DNA, 21 bp, Artificial Sequence
  Flk-1/KDR-1 target sequence
aaatatcctcttatcggagaa

SEQ ID NO: 1144 - DNA, 21 bp, Artificial Sequence
  Flk-1/KDR-1 target sequence
aatatcctcttatcggagaag

SEQ ID NO: 1145 - DNA, 21 bp, Artificial Sequence
  Flk-1/KDR-1 target sequence
aatatcctcttatcggagaag

SEQ ID NO: 1146 - DNA, 21 bp, Artificial Sequence
  Flk-1/KDR-1 target sequence
aagaacgtggttaaaatctgt

SEQ ID NO: 1147 - DNA, 21 bp, Artificial Sequence
  Flk-1/KDR-1 target sequence
aacgtggttaaaatctgtgac

SEQ ID NO: 1148 - DNA, 21 bp, Artificial Sequence
  Flk-1/KDR-1 target sequence
aaaatctgtgactttggcttg

SEQ ID NO: 1149 - DNA, 21 bp, Artificial Sequence
  Flk-1/KDR-1 target sequence
aaatctgtgactttggcttgg

SEQ ID NO: 1150 - DNA, 21 bp, Artificial Sequence
  Flk-1/KDR-1 target sequence
aatctgtgactttggcttggc

SEQ ID NO: 1151 - DNA, 21 bp, Artificial Sequence
  Flk-1/KDR-1 target sequence
aaagatccagattatgtcaga

SEQ ID NO: 1152 - DNA, 21 bp, Artificial Sequence
  Flk-1/KDR-1 target sequence
aagatccagattatgtcagaa

SEQ ID NO: 1153 - DNA, 21 bp, Artificial Sequence
  Flk-1/KDR-1 target sequence
aaaaggagatgctcgcctccc

SEQ ID NO: 1154 - DNA, 21 bp, Artificial Sequence
  Flk-1/KDR-1 target sequence
aaaggagatgctcgcctccct

SEQ ID NO: 1155 - DNA, 21 bp, Artificial Sequence
  Flk-1/KDR-1 target sequence
aaggagatgctcgcctccctt

SEQ ID NO: 1156 - DNA, 21 bp, Artificial Sequence
  Flk-1/KDR-1 target sequence
aaatggatggccccagaaaca

SEQ ID NO: 1157 - DNA, 21 bp, Artificial Sequence
  Flk-1/KDR-1 target sequence
aatggatggccccagaaacaa

SEQ ID NO: 1158 - DNA, 21 bp, Artificial Sequence
  Flk-1/KDR-1 target sequence
aaacaatttttgacagagtgt

SEQ ID NO: 1159 - DNA, 21 bp, Artificial Sequence
  Flk-1/KDR-1 target sequence
aacaatttttgacagagtgta

SEQ ID NO: 1160 - DNA, 21 bp, Artificial Sequence
  Flk-1/KDR-1 target sequence
aatttttgacagagtgtacac

SEQ ID NO: 1161 - DNA, 21 bp, Artificial Sequence
  Flk-1/KDR-1 target sequence
aatccagagtgacgtctggtc

SEQ ID NO: 1162 - DNA, 21 bp, Artificial Sequence
  Flk-1/KDR-1 target sequence
aaatattttccttaggtgctt

SEQ ID NO: 1163 - DNA, 21 bp, Artificial Sequence
  Flk-1/KDR-1 target sequence
aatattttccttaggtgcttc

SEQ ID NO: 1164 - DNA, 21 bp, Artificial Sequence
  Flk-1/KDR-1 target sequence
aaagattgatgaagaattttg

SEQ ID NO: 1165 - DNA, 21 bp, Artificial Sequence
  Flk-1/KDR-1 target sequence
aagattgatgaagaattttgt

SEQ ID NO: 1166 - DNA, 21 bp, Artificial Sequence
  Flk-1/KDR-1 target sequence
aagaattttgtaggcgattga

SEQ ID NO: 1167 - DNA, 21 bp, Artificial Sequence
  Flk-1/KDR-1 target sequence
aattttgtaggcgattgaaag

SEQ ID NO: 1168 - DNA, 21 bp, Artificial Sequence
  Flk-1/KDR-1 target sequence
aaagaaggaactagaatgagg

SEQ ID NO: 1169 - DNA, 21 bp, Artificial Sequence
  Flk-1/KDR-1 target sequence
aagaaggaactagaatgaggg

SEQ ID NO: 1170 - DNA, 21 bp, Artificial Sequence
  Flk-1/KDR-1 target sequence
aaggaactagaatgagggccc

SEQ ID NO: 1171 - DNA, 21 bp, Artificial Sequence
  Flk-1/KDR-1 target sequence
aactagaatgagggcccctga

SEQ ID NO: 1172 - DNA, 21 bp, Artificial Sequence
  Flk-1/KDR-1 target sequence
aatgagggcccctgattatac

SEQ ID NO: 1173 - DNA, 21 bp, Artificial Sequence
  Flk-1/KDR-1 target sequence
aaatgtaccagaccatgctgg

SEQ ID NO: 1174 - DNA, 21 bp, Artificial Sequence
  Flk-1/KDR-1 target sequence
aatgtaccagaccatgctgga

SEQ ID NO: 1175 - DNA, 21 bp, Artificial Sequence
  Flk-1/KDR-1 target sequence
aacatttgggaaatctcttgc

SEQ ID NO: 1176 - DNA, 21 bp, Artificial Sequence
  Flk-1/KDR-1 target sequence
aaatctcttgcaagctaatgc

SEQ ID NO: 1177 - DNA, 21 bp, Artificial Sequence
  Flk-1/KDR-1 target sequence
aatctcttgcaagctaatgct

SEQ ID NO: 1178 - DNA, 21 bp, Artificial Sequence
  Flk-1/KDR-1 target sequence
aagctaatgctcagcaggatg

SEQ ID NO: 1179 - DNA, 21 bp, Artificial Sequence
  Flk-1/KDR-1 target sequence
aatgctcagcaggatggcaaa

SEQ ID NO: 1180 - DNA, 21 bp, Artificial Sequence
  Flk-1/KDR-1 target sequence
aaagactacattgttcttccg

SEQ ID NO: 1181 - DNA, 21 bp, Artificial Sequence
  Flk-1/KDR-1 target sequence
aagactacattgttcttccga

SEQ ID NO: 1182 - DNA, 21 bp, Artificial Sequence
  Flk-1/KDR-1 target sequence
aagaggattctggactctctc

SEQ ID NO: 1183 - DNA, 21 bp, Artificial Sequence
  Flk-1/KDR-1 target sequence
aagtatgtgaccccaaattcc

SEQ ID NO: 1184 - DNA, 21 bp, Artificial Sequence
  Flk-1/KDR-1 target sequence
aaattccattatgacaacaca

SEQ ID NO: 1185 - DNA, 21 bp, Artificial Sequence
  Flk-1/KDR-1 target sequence
aattccattatgacaacacag

SEQ ID NO: 1186 - DNA, 21 bp, Artificial Sequence
  Flk-1/KDR-1 target sequence
aacacagcaggaatcagtcag

SEQ ID NO: 1187 - DNA, 21 bp, Artificial Sequence
  Flk-1/KDR-1 target sequence
aatcagtcagtatctgcagaa

SEQ ID NO: 1188 - DNA, 21 bp, Artificial Sequence
  Flk-1/KDR-1 target sequence
aacagtaagcgaaagagccgg

SEQ ID NO: 1189 - DNA, 21 bp, Artificial Sequence
  Flk-1/KDR-1 target sequence
aagcgaaagagccggcctgtg

SEQ ID NO: 1190 - DNA, 21 bp, Artificial Sequence
  Flk-1/KDR-1 target sequence
aaagagccggcctgtgagtgt

SEQ ID NO: 1191 - DNA, 21 bp, Artificial Sequence
  Flk-1/KDR-1 target sequence
aagagccggcctgtgagtgta

SEQ ID NO: 1192 - DNA, 21 bp, Artificial Sequence
  Flk-1/KDR-1 target sequence
aaaaacatttgaagatatccc

SEQ ID NO: 1193 - DNA, 21 bp, Artificial Sequence
  Flk-1/KDR-1 target sequence
aaaacatttgaagatatcccg

SEQ ID NO: 1194 - DNA, 21 bp, Artificial Sequence
  Flk-1/KDR-1 target sequence
aaacatttgaagatatcccgt

SEQ ID NO: 1195 - DNA, 21 bp, Artificial Sequence
  Flk-1/KDR-1 target sequence
aacatttgaagatatcccgtt

SEQ ID NO: 1196 - DNA, 21 bp, Artificial Sequence
  Flk-1/KDR-1 target sequence
aagatatcccgttagaagaac

SEQ ID NO: 1197 - DNA, 21 bp, Artificial Sequence
  Flk-1/KDR-1 target sequence
aagaaccagaagtaaaagtaa

SEQ ID NO: 1198 - DNA, 21 bp, Artificial Sequence
  Flk-1/KDR-1 target sequence
aaccagaagtaaaagtaatcc

SEQ ID NO: 1199 - DNA, 21 bp, Artificial Sequence
  Flk-1/KDR-1 target sequence
aagtaaaagtaatcccagatg

SEQ ID NO: 1200 - DNA, 21 bp, Artificial Sequence
  Flk-1/KDR-1 target sequence
aaaagtaatcccagatgacaa

SEQ ID NO: 1201 - DNA, 21 bp, Artificial Sequence
  Flk-1/KDR-1 target sequence
aaagtaatcccagatgacaac

SEQ ID NO: 1202 - DNA, 21 bp, Artificial Sequence
  Flk-1/KDR-1 target sequence
aagtaatcccagatgacaacc

SEQ ID NO: 1203 - DNA, 21 bp, Artificial Sequence
  Flk-1/KDR-1 target sequence
aatcccagatgacaaccagac

SEQ ID NO: 1204 - DNA, 21 bp, Artificial Sequence
  Flk-1/KDR-1 target sequence
aaccagacggacagtggtatg

SEQ ID NO: 1205 - DNA, 21 bp, Artificial Sequence
  Flk-1/KDR-1 target sequence
aagagctgaaaactttggaag

SEQ ID NO: 1206 - DNA, 21 bp, Artificial Sequence
  Flk-1/KDR-1 target sequence
aaaactttggaagacagaacc

SEQ ID NO: 1207 - DNA, 21 bp, Artificial Sequence
  Flk-1/KDR-1 target sequence
aaactttggaagacagaacca

SEQ ID NO: 1208 - DNA, 21 bp, Artificial Sequence
  Flk-1/KDR-1 target sequence
aactttggaagacagaaccaa

SEQ ID NO: 1209 - DNA, 21 bp, Artificial Sequence
  Flk-1/KDR-1 target sequence
aagacagaaccaaattatctc

SEQ ID NO: 1210 - DNA, 21 bp, Artificial Sequence
  Flk-1/KDR-1 target sequence
aaccaaattatctccatcttt

SEQ ID NO: 1211 - DNA, 21 bp, Artificial Sequence
  Flk-1/KDR-1 target sequence
aaattatctccatcttttggt

SEQ ID NO: 1212 - DNA, 21 bp, Artificial Sequence
  Flk-1/KDR-1 target sequence
aattatctccatcttttggtg

SEQ ID NO: 1213 - DNA, 21 bp, Artificial Sequence
  Flk-1/KDR-1 target sequence
aatggtgcccagcaaaagcag

SEQ ID NO: 1214 - DNA, 21 bp, Artificial Sequence
  Flk-1/KDR-1 target sequence
aaaagcagggagtctgtggca

SEQ ID NO: 1215 - DNA, 21 bp, Artificial Sequence
  Flk-1/KDR-1 target sequence
aaagcagggagtctgtggcat

SEQ ID NO: 1216 - DNA, 21 bp, Artificial Sequence
  Flk-1/KDR-1 target sequence
aagcagggagtctgtggcatc

SEQ ID NO: 1217 - DNA, 21 bp, Artificial Sequence
  Flk-1/KDR-1 target sequence
aaggctcaaaccagacaagcg

SEQ ID NO: 1218 - DNA, 21 bp, Artificial Sequence
  Flk-1/KDR-1 target sequence
aaaccagacaagcggctacca

SEQ ID NO: 1219 - DNA, 21 bp, Artificial Sequence
  Flk-1/KDR-1 target sequence
aaccagacaagcggctaccag

SEQ ID NO: 1220 - DNA, 21 bp, Artificial Sequence
  Flk-1/KDR-1 target sequence
aagcggctaccagtccggata

SEQ ID NO: 1221 - DNA, 21 bp, Artificial Sequence
  Flk-1/KDR-1 target sequence
aagcagaacttttaaagctga

SEQ ID NO: 1222 - DNA, 21 bp, Artificial Sequence
  Flk-1/KDR-1 target sequence
gacatacttacaattaaggct

SEQ ID NO: 1223 - DNA, 21 bp, Artificial Sequence
  Flk-1/KDR-1 target sequence
gatttgttcctgatggtaaca

SEQ ID NO: 1224 - DNA, 21 bp, Artificial Sequence
  Flk-1/KDR-1 target sequence
ttttgagcaccttaactatag

SEQ ID NO: 1225 - DNA, 21 bp, Artificial Sequence
  Flk-1/KDR-1 target sequence
gagccatgtggtctctctggt

SEQ ID NO: 1226 - DNA, 21 bp, Artificial Sequence
  Flk-1/KDR-1 target sequence
ggtgatctccttccacgtgac

SEQ ID NO: 1227 - DNA, 21 bp, Artificial Sequence
  Flk-1/KDR-1 target sequence
gtggtcaggcagctcacagtc

SEQ ID NO: 1228 - DNA, 21 bp, Artificial Sequence
  Flk-1/KDR-1 target sequence
cggtgattgccatgttcttct

SEQ ID NO: 1229 - DNA, 21 bp, Artificial Sequence
  Flk-1/KDR-1 target sequence
ttctaggtgcctgtaccaagc

SEQ ID NO: 1230 - DNA, 21 bp, Artificial Sequence
  Flk-1/KDR-1 target sequence
tgtatccacagggacctggcg

SEQ ID NO: 1231 - DNA, 21 bp, Artificial Sequence
  Flk-1/KDR-1 target sequence
taccagaccatgctggactgc

SEQ ID NO: 1232 - DNA, 21 bp, Artificial Sequence
  Flk-1/KDR-1 target sequence
ttatctccatcttttggtgga

SEQ ID NO: 1233 - DNA, 21 bp, Artificial Sequence
  ICAM-1 target sequence
aatgcccagacatctgtgtcc

SEQ ID NO: 1234 - DNA, 21 bp, Artificial Sequence
  ICAM-1 target sequence
aaaagtcatcctgccccgggg

SEQ ID NO: 1235 - DNA, 21 bp, Artificial Sequence
  ICAM-1 target sequence
aaagtcatcctgccccgggga

SEQ ID NO: 1236 - DNA, 21 bp, Artificial Sequence
  ICAM-1 target sequence
aagtcatcctgccccggggag

SEQ ID NO: 1237 - DNA, 21 bp, Artificial Sequence
  ICAM-1 target sequence
aagttgttgggcatagagacc

SEQ ID NO: 1238 - DNA, 21 bp, Artificial Sequence
  ICAM-1 target sequence
aaaaaggagttgctcctgcct

SEQ ID NO: 1239 - DNA, 21 bp, Artificial Sequence
  ICAM-1 target sequence
aaaaggagttgctcctgcctg

SEQ ID NO: 1240 - DNA, 21 bp, Artificial Sequence
  ICAM-1 target sequence
aaaggagttgctcctgcctgg

SEQ ID NO: 1241 - DNA, 21 bp, Artificial Sequence
  ICAM-1 target sequence
aaggagttgctcctgcctggg

SEQ ID NO: 1242 - DNA, 21 bp, Artificial Sequence
  ICAM-1 target sequence
aacaaccggaaggtgtatgaa

SEQ ID NO: 1243 - DNA, 21 bp, Artificial Sequence
  ICAM-1 target sequence
aaccggaaggtgtatgaactg

SEQ ID NO: 1244 - DNA, 21 bp, Artificial Sequence
  ICAM-1 target sequence
aaggtgtatgaactgagcaat

SEQ ID NO: 1245 - DNA, 21 bp, Artificial Sequence
  ICAM-1 target sequence
aactgagcaatgtgcaagaag

SEQ ID NO: 1246 - DNA, 21 bp, Artificial Sequence
  ICAM-1 target sequence
aatgtgcaagaagatagccaa

SEQ ID NO: 1247 - DNA, 21 bp, Artificial Sequence
  ICAM-1 target sequence
aagaagatagccaaccaatgt

SEQ ID NO: 1248 - DNA, 21 bp, Artificial Sequence
  ICAM-1 target sequence
aagatagccaaccaatgtgct

SEQ ID NO: 1249 - DNA, 21 bp, Artificial Sequence
  ICAM-1 target sequence
aaccaatgtgctattcaaact

SEQ ID NO: 1250 - DNA, 21 bp, Artificial Sequence
  ICAM-1 target sequence
aatgtgctattcaaactgccc

SEQ ID NO: 1251 - DNA, 21 bp, Artificial Sequence
  ICAM-1 target sequence
aaactgccctgatgggcagtc

SEQ ID NO: 1252 - DNA, 21 bp, Artificial Sequence
  ICAM-1 target sequence
aactgccctgatgggcagtca

SEQ ID NO: 1253 - DNA, 21 bp, Artificial Sequence
  ICAM-1 target sequence
aacagctaaaaccttcctcac

SEQ ID NO: 1254 - DNA, 21 bp, Artificial Sequence
  ICAM-1 target sequence
aaaaccttcctcaccgtgtac

SEQ ID NO: 1255 - DNA, 21 bp, Artificial Sequence
  ICAM-1 target sequence
aaaccttcctcaccgtgtact

SEQ ID NO: 1256 - DNA, 21 bp, Artificial Sequence
  ICAM-1 target sequence
aaccttcctcaccgtgtactg

SEQ ID NO: 1257 - DNA, 21 bp, Artificial Sequence
  ICAM-1 target sequence
aacgggtggaactggcacccc

SEQ ID NO: 1258 - DNA, 21 bp, Artificial Sequence
  ICAM-1 target sequence
aactggcacccctcccctctt

SEQ ID NO: 1259 - DNA, 21 bp, Artificial Sequence
  ICAM-1 target sequence
aagaaccttaccctacgctgc

SEQ ID NO: 1260 - DNA, 21 bp, Artificial Sequence
  ICAM-1 target sequence
aaccttaccctacgctgccag

SEQ ID NO: 1261 - DNA, 21 bp, Artificial Sequence
  ICAM-1 target sequence
aacctcaccgtggtgctgctc

SEQ ID NO: 1262 - DNA, 21 bp, Artificial Sequence
  ICAM-1 target sequence
aaggagctgaaacgggagcca

SEQ ID NO: 1263 - DNA, 21 bp, Artificial Sequence
  ICAM-1 target sequence
aaacgggagccagctgtgggg

SEQ ID NO: 1264 - DNA, 21 bp, Artificial Sequence
  ICAM-1 target sequence
aacgggagccagctgtggggg

SEQ ID NO: 1265 - DNA, 21 bp, Artificial Sequence
  ICAM-1 target sequence
aatttctcgtgccgcactgaa

SEQ ID NO: 1266 - DNA, 21 bp, Artificial Sequence
  ICAM-1 target sequence
aactggacctgcggccccaag

SEQ ID NO: 1267 - DNA, 21 bp, Artificial Sequence
  ICAM-1 target sequence
aagggctggagctgtttgaga

SEQ ID NO: 1268 - DNA, 21 bp, Artificial Sequence
  ICAM-1 target sequence
aacacctcggccccctaccag

SEQ ID NO: 1269 - DNA, 21 bp, Artificial Sequence
  ICAM-1 target sequence
aacttgtcagcccccgggtcc

SEQ ID NO: 1270 - DNA, 21 bp, Artificial Sequence
  ICAM-1 target sequence
aaccccacagtcacctatggc

SEQ ID NO: 1271 - DNA, 21 bp, Artificial Sequence
  ICAM-1 target sequence
aacgactccttctcggccaag

SEQ ID NO: 1272 - DNA, 21 bp, Artificial Sequence
  ICAM-1 target sequence
aaggcctcagtcagtgtgacc

SEQ ID NO: 1273 - DNA, 21 bp, Artificial Sequence
  ICAM-1 target sequence
aatactggggaaccagagcca

SEQ ID NO: 1274 - DNA, 21 bp, Artificial Sequence
  ICAM-1 target sequence
aaccagagccaggagacactg

SEQ ID NO: 1275 - DNA, 21 bp, Artificial Sequence
  ICAM-1 target sequence
aacgtgattctgacgaagcca

SEQ ID NO: 1276 - DNA, 21 bp, Artificial Sequence
  ICAM-1 target sequence
aagccagaggtctcagaaggg

SEQ ID NO: 1277 - DNA, 21 bp, Artificial Sequence
  ICAM-1 target sequence
aagggaccgaggtgacagtga

SEQ ID NO: 1278 - DNA, 21 bp, Artificial Sequence
  ICAM-1 target sequence
aagtgtgaggcccaccctaga

SEQ ID NO: 1279 - DNA, 21 bp, Artificial Sequence
  ICAM-1 target sequence
aaggtgacgctgaatggggtt

SEQ ID NO: 1280 - DNA, 21 bp, Artificial Sequence
  ICAM-1 target sequence
aatggggttccagcccagcca

SEQ ID NO: 1281 - DNA, 21 bp, Artificial Sequence
  ICAM-1 target sequence
aaggccaccccagaggacaac

SEQ ID NO: 1282 - DNA, 21 bp, Artificial Sequence
  ICAM-1 target sequence
aacgggcgcagcttctcctgc

SEQ ID NO: 1283 - DNA, 21 bp, Artificial Sequence
  ICAM-1 target sequence
aaccctggaggtggccggcca

SEQ ID NO: 1284 - DNA, 21 bp, Artificial Sequence
  ICAM-1 target sequence
aagaaccagacccgggagctt

SEQ ID NO: 1285 - DNA, 21 bp, Artificial Sequence
  ICAM-1 target sequence
aaccagacccgggagcttcgt

SEQ ID NO: 1286 - DNA, 21 bp, Artificial Sequence
  ICAM-1 target sequence
aaactggacgtggccagaaaa

SEQ ID NO: 1287 - DNA, 21 bp, Artificial Sequence
  ICAM-1 target sequence
aactggacgtggccagaaaat

SEQ ID NO: 1288 - DNA, 21 bp, Artificial Sequence
  ICAM-1 target sequence
aaaattcccagcagactccaa

SEQ ID NO: 1289 - DNA, 21 bp, Artificial Sequence
  ICAM-1 target sequence
aaattcccagcagactccaat

SEQ ID NO: 1290 - DNA, 21 bp, Artificial Sequence
  ICAM-1 target sequence
aattcccagcagactccaatg

SEQ ID NO: 1291 - DNA, 21 bp, Artificial Sequence
  ICAM-1 target sequence
aatgtgccaggcttgggggaa

SEQ ID NO: 1292 - DNA, 21 bp, Artificial Sequence
  ICAM-1 target sequence
aacccattgcccgagctcaag

SEQ ID NO: 1293 - DNA, 21 bp, Artificial Sequence
  ICAM-1 target sequence
aagtgtctaaaggatggcact

SEQ ID NO: 1294 - DNA, 21 bp, Artificial Sequence
  ICAM-1 target sequence
aaaggatggcactttcccact

SEQ ID NO: 1295 - DNA, 21 bp, Artificial Sequence
  ICAM-1 target sequence
aaggatggcactttcccactg

SEQ ID NO: 1296 - DNA, 21 bp, Artificial Sequence
  ICAM-1 target sequence
aatcagtgactgtcactcgag

SEQ ID NO: 1297 - DNA, 21 bp, Artificial Sequence
  ICAM-1 target sequence
aaggggaggtcacccgcgagg

SEQ ID NO: 1298 - DNA, 21 bp, Artificial Sequence
  ICAM-1 target sequence
aatgtgctctccccccggtat

SEQ ID NO: 1299 - DNA, 21 bp, Artificial Sequence
  ICAM-1 target sequence
aatgggcactgcaggcctcag

SEQ ID NO: 1300 - DNA, 21 bp, Artificial Sequence
  ICAM-1 target sequence
aaccgccagcggaagatcaag

SEQ ID NO: 1301 - DNA, 21 bp, Artificial Sequence
  ICAM-1 target sequence
aagatcaagaaatacagacta

SEQ ID NO: 1302 - DNA, 21 bp, Artificial Sequence
  ICAM-1 target sequence
aagaaatacagactacaacag

SEQ ID NO: 1303 - DNA, 21 bp, Artificial Sequence
  ICAM-1 target sequence
aaatacagactacaacaggcc

SEQ ID NO: 1304 - DNA, 21 bp, Artificial Sequence
  ICAM-1 target sequence
aatacagactacaacaggccc

SEQ ID NO: 1305 - DNA, 21 bp, Artificial Sequence
  ICAM-1 target sequence
aacaggcccaaaaagggaccc

SEQ ID NO: 1306 - DNA, 21 bp, Artificial Sequence
  ICAM-1 target sequence
aaaaagggacccccatgaaac

SEQ ID NO: 1307 - DNA, 21 bp, Artificial Sequence
  ICAM-1 target sequence
aaaagggacccccatgaaacc

SEQ ID NO: 1308 - DNA, 21 bp, Artificial Sequence
  Ang1 target sequence
aatcagcgccgaagtccagaa

SEQ ID NO: 1309 - DNA, 21 bp, Artificial Sequence
  Ang1 target sequence
aagtccagaaaacagtgggag

SEQ ID NO: 1310 - DNA, 21 bp, Artificial Sequence
  Ang1 target sequence
aaaacagtgggagaagatata

SEQ ID NO: 1311 - DNA, 21 bp, Artificial Sequence
  Ang1 target sequence
aaacagtgggagaagatataa

SEQ ID NO: 1312 - DNA, 21 bp, Artificial Sequence
  Ang1 target sequence
aacagtgggagaagatataac

SEQ ID NO: 1313 - DNA, 21 bp, Artificial Sequence
  Ang1 target sequence
aagatataaccggattcaaca

SEQ ID NO: 1314 - DNA, 21 bp, Artificial Sequence
  Ang1 target sequence
aaccggattcaacatgggcaa

SEQ ID NO: 1315 - DNA, 21 bp, Artificial Sequence
  Ang1 target sequence
aacatgggcaatgtgcctaca

SEQ ID NO: 1316 - DNA, 21 bp, Artificial Sequence
  Ang1 target sequence
aatgtgcctacactttcattc

SEQ ID NO: 1317 - DNA, 21 bp, Artificial Sequence
  Ang1 target sequence
aacacgatggcaactgtcgtg

SEQ ID NO: 1318 - DNA, 21 bp, Artificial Sequence
  Ang1 target sequence
aactgtcgtgagagtacgaca

SEQ ID NO: 1319 - DNA, 21 bp, Artificial Sequence
  Ang1 target sequence
aacacaaacgctctgcagaga

SEQ ID NO: 1320 - DNA, 21 bp, Artificial Sequence
  Ang1 target sequence
aaacgctctgcagagagatgc

SEQ ID NO: 1321 - DNA, 21 bp, Artificial Sequence
  Ang1 target sequence
aacgctctgcagagagatgct

SEQ ID NO: 1322 - DNA, 21 bp, Artificial Sequence
  Ang1 target sequence
aaccggatttctcttcccaga

SEQ ID NO: 1323 - DNA, 21 bp, Artificial Sequence
  Ang1 target sequence
aaacttcaacatctggaacat

SEQ ID NO: 1324 - DNA, 21 bp, Artificial Sequence
  Ang1 target sequence
aacttcaacatctggaacatg

SEQ ID NO: 1325 - DNA, 21 bp, Artificial Sequence
  Ang1 target sequence
aacatctggaacatgtgatgg

SEQ ID NO: 1326 - DNA, 21 bp, Artificial Sequence
  Ang1 target sequence
aacatgtgatggaaaattata

SEQ ID NO: 1327 - DNA, 21 bp, Artificial Sequence
  Ang1 target sequence
aaaattatactcagtggctgc

SEQ ID NO: 1328 - DNA, 21 bp, Artificial Sequence
  Ang1 target sequence
aaattatactcagtggctgca

SEQ ID NO: 1329 - DNA, 21 bp, Artificial Sequence
  Ang1 target sequence
aattatactcagtggctgcaa

SEQ ID NO: 1330 - DNA, 21 bp, Artificial Sequence
  Ang1 target sequence
aaaaacttgagaattacattg

SEQ ID NO: 1331 - DNA, 21 bp, Artificial Sequence
  Ang1 target sequence
aaaacttgagaattacattgt

SEQ ID NO: 1332 - DNA, 21 bp, Artificial Sequence
  Ang1 target sequence
aaacttgagaattacattgtg

SEQ ID NO: 1333 - DNA, 21 bp, Artificial Sequence
  Ang1 target sequence
aacttgagaattacattgtgg

SEQ ID NO: 1334 - DNA, 21 bp, Artificial Sequence
  Ang1 target sequence
aattacattgtggaaaacatg

SEQ ID NO: 1335 - DNA, 21 bp, Artificial Sequence
  Ang1 target sequence
aaaacatgaagtcggagatgg

SEQ ID NO: 1336 - DNA, 21 bp, Artificial Sequence
  Ang1 target sequence
aaacatgaagtcggagatggc

SEQ ID NO: 1337 - DNA, 21 bp, Artificial Sequence
  Ang1 target sequence
aacatgaagtcggagatggcc

SEQ ID NO: 1338 - DNA, 21 bp, Artificial Sequence
  Ang1 target sequence
aagtcggagatggcccagata

SEQ ID NO: 1339 - DNA, 21 bp, Artificial Sequence
  Ang1 target sequence
aatgcagttcagaaccacacg

SEQ ID NO: 1340 - DNA, 21 bp, Artificial Sequence
  Ang1 target sequence
aaccacacggctaccatgctg

SEQ ID NO: 1341 - DNA, 21 bp, Artificial Sequence
  Ang1 target sequence
aaccagcctcctctctcagac

SEQ ID NO: 1342 - DNA, 21 bp, Artificial Sequence
  Ang1 target sequence
aaagctgacagatgttgagac

SEQ ID NO: 1343 - DNA, 21 bp, Artificial Sequence
  Ang1 target sequence
aagctgacagatgttgagacc

SEQ ID NO: 1344 - DNA, 21 bp, Artificial Sequence
  Ang1 target sequence
aaatcaaacttctcgacttga

SEQ ID NO: 1345 - DNA, 21 bp, Artificial Sequence
  Ang1 target sequence
aatcaaacttctcgacttgag

SEQ ID NO: 1346 - DNA, 21 bp, Artificial Sequence
  Ang1 target sequence
aaacttctcgacttgagatac

SEQ ID NO: 1347 - DNA, 21 bp, Artificial Sequence
  Ang1 target sequence
aacttctcgacttgagataca

SEQ ID NO: 1348 - DNA, 21 bp, Artificial Sequence
  Ang1 target sequence
aattcattatccacctacaag

SEQ ID NO: 1349 - DNA, 21 bp, Artificial Sequence
  Ang1 target sequence
aagctagagaagcaacttctt

SEQ ID NO: 1350 - DNA, 21 bp, Artificial Sequence
  Ang1 target sequence
aagcaacttcttcaacagaca

SEQ ID NO: 1351 - DNA, 21 bp, Artificial Sequence
  Ang1 target sequence
aacttcttcaacagacaaatg

SEQ ID NO: 1352 - DNA, 21 bp, Artificial Sequence
  Ang1 target sequence
aacagacaaatgaaatcttga

SEQ ID NO: 1353 - DNA, 21 bp, Artificial Sequence
  Ang1 target sequence
aaatgaaatcttgaagatcca

SEQ ID NO: 1354 - DNA, 21 bp, Artificial Sequence
  Ang1 target sequence
aatgaaatcttgaagatccat

SEQ ID NO: 1355 - DNA, 20 bp, Artificial Sequence
  Ang1 target sequence
aaatcttgaagatccatgaa

SEQ ID NO: 1356 - DNA, 21 bp, Artificial Sequence
  Ang1 target sequence
aatcttgaagatccatgaaaa

SEQ ID NO: 1357 - DNA, 21 bp, Artificial Sequence
  Ang1 target sequence
aagatccatgaaaaaaacagt

SEQ ID NO: 1358 - DNA, 21 bp, Artificial Sequence
  Ang1 target sequence
aaaaaaacagtttattagaac

SEQ ID NO: 1359 - DNA, 21 bp, Artificial Sequence
  Ang1 target sequence
aaaaaacagtttattagaaca

SEQ ID NO: 1360 - DNA, 21 bp, Artificial Sequence
  Ang1 target sequence
aaaaacagtttattagaacat

SEQ ID NO: 1361 - DNA, 21 bp, Artificial Sequence
  Ang1 target sequence
aaaacagtttattagaacata

SEQ ID NO: 1362 - DNA, 21 bp, Artificial Sequence
  Ang1 target sequence
aaacagtttattagaacataa

SEQ ID NO: 1363 - DNA, 21 bp, Artificial Sequence
  Ang1 target sequence
aacagtttattagaacataaa

SEQ ID NO: 1364 - DNA, 21 bp, Artificial Sequence
  Ang1 target sequence
aacataaaatcttagaaatgg

SEQ ID NO: 1365 - DNA, 21 bp, Artificial Sequence
  Ang1 target sequence
aaaatcttagaaatggaagga

SEQ ID NO: 1366 - DNA, 21 bp, Artificial Sequence
  Ang1 target sequence
aaatcttagaaatggaaggaa

SEQ ID NO: 1367 - DNA, 21 bp, Artificial Sequence
  Ang1 target sequence
aatcttagaaatggaaggaaa

SEQ ID NO: 1368 - DNA, 21 bp, Artificial Sequence
  Ang1 target sequence
aaatggaaggaaaacacaagg

SEQ ID NO: 1369 - DNA, 21 bp, Artificial Sequence
  Ang1 target sequence
aatggaaggaaaacacaagga

SEQ ID NO: 1370 - DNA, 21 bp, Artificial Sequence
  Ang1 target sequence
aaggaaaacacaaggaagagt

SEQ ID NO: 1371 - DNA, 21 bp, Artificial Sequence
  Ang1 target sequence
aaaacacaaggaagagttgga

SEQ ID NO: 1372 - DNA, 21 bp, Artificial Sequence
  Ang1 target sequence
aaacacaaggaagagttggac

SEQ ID NO: 1373 - DNA, 21 bp, Artificial Sequence
  Ang1 target sequence
aacacaaggaagagttggaca

SEQ ID NO: 1374 - DNA, 21 bp, Artificial Sequence
  Ang1 target sequence
aaggaagagttggacacctta

SEQ ID NO: 1375 - DNA, 21 bp, Artificial Sequence
  Ang1 target sequence
aagagttggacaccttaaagg

SEQ ID NO: 1376 - DNA, 21 bp, Artificial Sequence
  Ang1 target sequence
aaaggaagagaaagagaacct

SEQ ID NO: 1377 - DNA, 21 bp, Artificial Sequence
  Ang1 target sequence
aaggaagagaaagagaacctt

SEQ ID NO: 1378 - DNA, 21 bp, Artificial Sequence
  Ang1 target sequence
aagagaaagagaaccttcaag

SEQ ID NO: 1379 - DNA, 21 bp, Artificial Sequence
  Ang1 target sequence
aaagagaaccttcaaggcttg

SEQ ID NO: 1380 - DNA, 21 bp, Artificial Sequence
  Ang1 target sequence
aagagaaccttcaaggcttgg

SEQ ID NO: 1381 - DNA, 21 bp, Artificial Sequence
  Ang1 target sequence
aaccttcaaggcttggttact

SEQ ID NO: 1382 - DNA, 21 bp, Artificial Sequence
  Ang1 target sequence
aaggcttggttactcgtcaaa

SEQ ID NO: 1383 - DNA, 21 bp, Artificial Sequence
  Ang1 target sequence
aaacatatataatccaggagc

SEQ ID NO: 1384 - DNA, 21 bp, Artificial Sequence
  Ang1 target sequence
aacatatataatccaggagct

SEQ ID NO: 1385 - DNA, 21 bp, Artificial Sequence
  Ang1 target sequence
aatccaggagctggaaaagca

SEQ ID NO: 1386 - DNA, 21 bp, Artificial Sequence
  Ang1 target sequence
aaaagcaattaaacagagcta

SEQ ID NO: 1387 - DNA, 21 bp, Artificial Sequence
  Ang1 target sequence
aaagcaattaaacagagctac

SEQ ID NO: 1388 - DNA, 21 bp, Artificial Sequence
  Ang1 target sequence
aagcaattaaacagagctacc

SEQ ID NO: 1389 - DNA, 21 bp, Artificial Sequence
  Ang1 target sequence
aattaaacagagctaccacca

SEQ ID NO: 1390 - DNA, 21 bp, Artificial Sequence
  Ang1 target sequence
aaacagagctaccaccaacaa

SEQ ID NO: 1391 - DNA, 21 bp, Artificial Sequence
  Ang1 target sequence
aacagagctaccaccaacaac

SEQ ID NO: 1392 - DNA, 21 bp, Artificial Sequence
  Ang1 target sequence
aacaacagtgtccttcagaag

SEQ ID NO: 1393 - DNA, 21 bp, Artificial Sequence
  Ang1 target sequence
aacagtgtccttcagaagcag

SEQ ID NO: 1394 - DNA, 21 bp, Artificial Sequence
  Ang1 target sequence
aagcagcaactggagctgatg

SEQ ID NO: 1395 - DNA, 21 bp, Artificial Sequence
  Ang1 target sequence
aactggagctgatggacacag

SEQ ID NO: 1396 - DNA, 21 bp, Artificial Sequence
  Ang1 target sequence
aaccttgtcaatctttgcact

SEQ ID NO: 1397 - DNA, 21 bp, Artificial Sequence
  Ang1 target sequence
aatctttgcactaaagaaggt

SEQ ID NO: 1398 - DNA, 21 bp, Artificial Sequence
  Ang1 target sequence
aaagaaggtgttttactaaag

SEQ ID NO: 1399 - DNA, 21 bp, Artificial Sequence
  Ang1 target sequence
aagaaggtgttttactaaagg

SEQ ID NO: 1400 - DNA, 21 bp, Artificial Sequence
  Ang1 target sequence
aaggtgttttactaaagggag

SEQ ID NO: 1401 - DNA, 21 bp, Artificial Sequence
  Ang1 target sequence
aaagggaggaaaaagagagga

SEQ ID NO: 1402 - DNA, 21 bp, Artificial Sequence
  Ang1 target sequence
aagggaggaaaaagagaggaa

SEQ ID NO: 1403 - DNA, 21 bp, Artificial Sequence
  Ang1 target sequence
aaaaagagaggaagagaaacc

SEQ ID NO: 1404 - DNA, 21 bp, Artificial Sequence
  Ang1 target sequence
aaaagagaggaagagaaacca

SEQ ID NO: 1405 - DNA, 21 bp, Artificial Sequence
  Ang1 target sequence
aaagagaggaagagaaaccat

SEQ ID NO: 1406 - DNA, 21 bp, Artificial Sequence
  Ang1 target sequence
aagagaggaagagaaaccatt

SEQ ID NO: 1407 - DNA, 21 bp, Artificial Sequence
  Ang1 target sequence
aagagaaaccatttagagact

SEQ ID NO: 1408 - DNA, 21 bp, Artificial Sequence
  Ang1 target sequence
aaaccatttagagactgtgca

SEQ ID NO: 1409 - DNA, 21 bp, Artificial Sequence
  Ang1 target sequence
aaccatttagagactgtgcag

SEQ ID NO: 1410 - DNA, 21 bp, Artificial Sequence
  Ang1 target sequence
aagctggttttaataaaagtg

SEQ ID NO: 1411 - DNA, 21 bp, Artificial Sequence
  Ang1 target sequence
aataaaagtggaatctacact

SEQ ID NO: 1412 - DNA, 21 bp, Artificial Sequence
  Ang1 target sequence
aaaagtggaatctacactatt

SEQ ID NO: 1413 - DNA, 21 bp, Artificial Sequence
  Ang1 target sequence
aaagtggaatctacactattt

SEQ ID NO: 1414 - DNA, 21 bp, Artificial Sequence
  Ang1 target sequence
aagtggaatctacactattta

SEQ ID NO: 1415 - DNA, 21 bp, Artificial Sequence
  Ang1 target sequence
aatctacactatttatattaa

SEQ ID NO: 1416 - DNA, 21 bp, Artificial Sequence
  Ang1 target sequence
aataatatgccagaacccaaa

SEQ ID NO: 1417 - DNA, 21 bp, Artificial Sequence
  Ang1 target sequence
aatatgccagaacccaaaaag

SEQ ID NO: 1418 - DNA, 21 bp, Artificial Sequence
  Ang1 target sequence
aacccaaaaaggtgttttgca

SEQ ID NO: 1419 - DNA, 21 bp, Artificial Sequence
  Ang1 target sequence
aaaaaggtgttttgcaatatg

SEQ ID NO: 1420 - DNA, 21 bp, Artificial Sequence
  Ang1 target sequence
aaaaggtgttttgcaatatgg

SEQ ID NO: 1421 - DNA, 21 bp, Artificial Sequence
  Ang1 target sequence
aaaggtgttttgcaatatgga

SEQ ID NO: 1422 - DNA, 21 bp, Artificial Sequence
  Ang1 target sequence
aaggtgttttgcaatatggat

SEQ ID NO: 1423 - DNA, 21 bp, Artificial Sequence
  Ang1 target sequence
aatatggatgtcaatggggga

SEQ ID NO: 1424 - DNA, 21 bp, Artificial Sequence
  Ang1 target sequence
aatgggggaggttggactgta

SEQ ID NO: 1425 - DNA, 21 bp, Artificial Sequence
  Ang1 target sequence
aatacaacatcgtgaagatgg

SEQ ID NO: 1426 - DNA, 21 bp, Artificial Sequence
  Ang1 target sequence
aacatcgtgaagatggaagtc

SEQ ID NO: 1427 - DNA, 21 bp, Artificial Sequence
  Ang1 target sequence
aagatggaagtctagatttcc

SEQ ID NO: 1428 - DNA, 21 bp, Artificial Sequence
  Ang1 target sequence
aagtctagatttccaaagagg

SEQ ID NO: 1429 - DNA, 21 bp, Artificial Sequence
  Ang1 target sequence
aaagaggctggaaggaatata

SEQ ID NO: 1430 - DNA, 21 bp, Artificial Sequence
  Ang1 target sequence
aagaggctggaaggaatataa

SEQ ID NO: 1431 - DNA, 21 bp, Artificial Sequence
  Ang1 target sequence
aaggaatataaaatgggtttt

SEQ ID NO: 1432 - DNA, 21 bp, Artificial Sequence
  Ang1 target sequence
aatataaaatgggttttggaa

SEQ ID NO: 1433 - DNA, 20 bp, Artificial Sequence
  Ang1 target sequence
aaaatgggttttggaaatcc

SEQ ID NO: 1434 - DNA, 21 bp, Artificial Sequence
  Ang1 target sequence
aaatgggttttggaaatccct

SEQ ID NO: 1435 - DNA, 21 bp, Artificial Sequence
  Ang1 target sequence
aatgggttttggaaatccctc

SEQ ID NO: 1436 - DNA, 21 bp, Artificial Sequence
  Ang1 target sequence
aaatccctccggtgaatattg

SEQ ID NO: 1437 - DNA, 21 bp, Artificial Sequence
  Ang1 target sequence
aatccctccggtgaatattgg

SEQ ID NO: 1438 - DNA, 21 bp, Artificial Sequence
  Ang1 target sequence
aatattggctggggaatgagt

SEQ ID NO: 1439 - DNA, 21 bp, Artificial Sequence
  Ang1 target sequence
aatgagtttatttttgccatt

SEQ ID NO: 1440 - DNA, 21 bp, Artificial Sequence
  Ang1 target sequence
aagaattgagttaatggactg

SEQ ID NO: 1441 - DNA, 21 bp, Artificial Sequence
  Ang1 target sequence
aattgagttaatggactggga

SEQ ID NO: 1442 - DNA, 21 bp, Artificial Sequence
  Ang1 target sequence
aatggactgggaagggaaccg

SEQ ID NO: 1443 - DNA, 21 bp, Artificial Sequence
  Ang1 target sequence
aagggaaccgagcctattcac

SEQ ID NO: 1444 - DNA, 21 bp, Artificial Sequence
  Ang1 target sequence
aaccgagcctattcacagtat

SEQ ID NO: 1445 - DNA, 21 bp, Artificial Sequence
  Ang1 target sequence
aaatgaaaagcaaaactatag

SEQ ID NO: 1446 - DNA, 21 bp, Artificial Sequence
  Ang1 target sequence
aatgaaaagcaaaactatagg

SEQ ID NO: 1447 - DNA, 21 bp, Artificial Sequence
  Ang1 target sequence
aaaagcaaaactataggttgt

SEQ ID NO: 1448 - DNA, 21 bp, Artificial Sequence
  Ang1 target sequence
aaagcaaaactataggttgta

SEQ ID NO: 1449 - DNA, 21 bp, Artificial Sequence
  Ang1 target sequence
aagcaaaactataggttgtat

SEQ ID NO: 1450 - DNA, 21 bp, Artificial Sequence
  Ang1 target sequence
aaaactataggttgtatttaa

SEQ ID NO: 1451 - DNA, 21 bp, Artificial Sequence
  Ang1 target sequence
aaactataggttgtatttaaa

SEQ ID NO: 1452 - DNA, 21 bp, Artificial Sequence
  Ang1 target sequence
aactataggttgtatttaaaa

SEQ ID NO: 1453 - DNA, 21 bp, Artificial Sequence
  Ang1 target sequence
aaaaggtcacactgggacagc

SEQ ID NO: 1454 - DNA, 21 bp, Artificial Sequence
  Ang1 target sequence
aaaggtcacactgggacagca

SEQ ID NO: 1455 - DNA, 21 bp, Artificial Sequence
  Ang1 target sequence
aaggtcacactgggacagcag

SEQ ID NO: 1456 - DNA, 21 bp, Artificial Sequence
  Ang1 target sequence
aaaacagagcagcctgatctt

SEQ ID NO: 1457 - DNA, 21 bp, Artificial Sequence
  Ang1 target sequence
aaacagagcagcctgatctta

SEQ ID NO: 1458 - DNA, 21 bp, Artificial Sequence
  Ang1 target sequence
aacagagcagcctgatcttac

SEQ ID NO: 1459 - DNA, 21 bp, Artificial Sequence
  Ang1 target sequence
aaagatgctgataatgacaac

SEQ ID NO: 1460 - DNA, 21 bp, Artificial Sequence
  Ang1 target sequence
aagatgctgataatgacaact

SEQ ID NO: 1461 - DNA, 21 bp, Artificial Sequence
  Ang1 target sequence
aatgacaactgtatgtgcaaa

SEQ ID NO: 1462 - DNA, 21 bp, Artificial Sequence
  Ang1 target sequence
aactgtatgtgcaaatgtgcc

SEQ ID NO: 1463 - DNA, 21 bp, Artificial Sequence
  Ang1 target sequence
aaatgtgccctcatgttaaca

SEQ ID NO: 1464 - DNA, 21 bp, Artificial Sequence
  Ang1 target sequence
aatgtgccctcatgttaacag

SEQ ID NO: 1465 - DNA, 21 bp, Artificial Sequence
  Ang1 target sequence
aacaggaggatggtggtttga

SEQ ID NO: 1466 - DNA, 21 bp, Artificial Sequence
  Ang1 target sequence
aatctaaatggaatgttctat

SEQ ID NO: 1467 - DNA, 21 bp, Artificial Sequence
  Ang1 target sequence
aaatggaatgttctatactgc

SEQ ID NO: 1468 - DNA, 21 bp, Artificial Sequence
  Ang1 target sequence
aatggaatgttctatactgcg

SEQ ID NO: 1469 - DNA, 21 bp, Artificial Sequence
  Ang1 target sequence
aatgttctatactgcgggaca

SEQ ID NO: 1470 - DNA, 21 bp, Artificial Sequence
  Ang1 target sequence
aaaaccatggaaaactgaatg

SEQ ID NO: 1471 - DNA, 21 bp, Artificial Sequence
  Ang1 target sequence
aaaccatggaaaactgaatgg

SEQ ID NO: 1472 - DNA, 21 bp, Artificial Sequence
  Ang1 target sequence
aaccatggaaaactgaatggg

SEQ ID NO: 1473 - DNA, 21 bp, Artificial Sequence
  Ang1 target sequence
aaaactgaatgggataaagtg

SEQ ID NO: 1474 - DNA, 21 bp, Artificial Sequence
  Ang1 target sequence
aaactgaatgggataaagtgg

SEQ ID NO: 1475 - DNA, 21 bp, Artificial Sequence
  Ang1 target sequence
aactgaatgggataaagtggc

SEQ ID NO: 1476 - DNA, 21 bp, Artificial Sequence
  Ang1 target sequence
aatgggataaagtggcactac

SEQ ID NO: 1477 - DNA, 21 bp, Artificial Sequence
  Ang1 target sequence
aaagtggcactacttcaaagg

SEQ ID NO: 1478 - DNA, 21 bp, Artificial Sequence
  Ang1 target sequence
aagtggcactacttcaaaggg

SEQ ID NO: 1479 - DNA, 21 bp, Artificial Sequence
  Ang1 target sequence
aaagggcccagttactcctta

SEQ ID NO: 1480 - DNA, 21 bp, Artificial Sequence
  Ang1 target sequence
aagggcccagttactccttac

SEQ ID NO: 1481 - DNA, 21 bp, Artificial Sequence
  Ang1 target sequence
gaagtccagaaaacagtggga

SEQ ID NO: 1482 - DNA, 21 bp, Artificial Sequence
  Ang1 target sequence
atggcaactgtcgtgagagta

SEQ ID NO: 1483 - DNA, 21 bp, Artificial Sequence
  Ang1 target sequence
cgtggaaccggatttctcttc

SEQ ID NO: 1484 - DNA, 21 bp, Artificial Sequence
  Ang1 target sequence
cattgtggaaaacatgaagtc

SEQ ID NO: 1485 - DNA, 21 bp, Artificial Sequence
  Ang1 target sequence
ttcagaaccacacggctacca

SEQ ID NO: 1486 - DNA, 21 bp, Artificial Sequence
  Ang1 target sequence
tactaaatcaaacttctcgac

SEQ ID NO: 1487 - DNA, 21 bp, Artificial Sequence
  Ang1 target sequence
cttcaacagacaaatgaaatc

SEQ ID NO: 1488 - DNA, 21 bp, Artificial Sequence
  Ang1 target sequence
gttggacaccttaaaggaaga

SEQ ID NO: 1489 - DNA, 21 bp, Artificial Sequence
  Ang1 target sequence
agctaccaccaacaacagtgt

SEQ ID NO: 1490 - DNA, 21 bp, Artificial Sequence
  Ang1 target sequence
ggtgttttactaaagggagga

SEQ ID NO: 1491 - DNA, 21 bp, Artificial Sequence
  Ang1 target sequence
tgtatatcaagctggttttaa

SEQ ID NO: 1492 - DNA, 21 bp, Artificial Sequence
  Ang1 target sequence
ccaaaaaggtgttttgcaata

SEQ ID NO: 1493 - DNA, 21 bp, Artificial Sequence
  Ang1 target sequence
gctggaaggaatataaaatgg

SEQ ID NO: 1494 - DNA, 21 bp, Artificial Sequence
  Ang1 target sequence
tcagaggcagtacatgctaag

SEQ ID NO: 1495 - DNA, 21 bp, Artificial Sequence
  Ang1 target sequence
acactgggacagcaggaaaac

SEQ ID NO: 1496 - DNA, 20 bp, Artificial Sequence
  Ang1 target sequence
atttcagcactaaagatgct

SEQ ID NO: 1497 - DNA, 22 bp, Artificial Sequence
  Ang1 target sequence
gataatgacaactgtatgtgca

SEQ ID NO: 1498 - DNA, 19 bp, Artificial Sequence
  Ang1 target sequence
tgtgccctcatgttaacag

SEQ ID NO: 1499 - DNA, 18 bp, Artificial Sequence
  Ang1 target sequence
aggatggtggtttgatgc

SEQ ID NO: 1500 - DNA, 19 bp, Artificial Sequence
  Ang1 target sequence
tggcccctccaatctaaat

SEQ ID NO: 1501 - DNA, 22 bp, Artificial Sequence
  Ang1 target sequence
aatgttctatactgcgggacaa

SEQ ID NO: 1502 - DNA, 23 bp, Artificial Sequence
  Ang1 target sequence
atggaaaactgaatgggataaag

SEQ ID NO: 1503 - DNA, 24 bp, Artificial Sequence
  Ang1 target sequence
aactgaatgggataaagtggcact

SEQ ID NO: 1504 - DNA, 21 bp, Artificial Sequence
  Ang2 target sequence
aacaactttcggaagagcatg

SEQ ID NO: 1505 - DNA, 21 bp, Artificial Sequence
  Ang2 target sequence
aactttcggaagagcatggac

SEQ ID NO: 1506 - DNA, 21 bp, Artificial Sequence
  Ang2 target sequence
aagagcatggacagcatagga

SEQ ID NO: 1507 - DNA, 21 bp, Artificial Sequence
  Ang2 target sequence
aaagaagcaatatcaggtcca

SEQ ID NO: 1508 - DNA, 21 bp, Artificial Sequence
  Ang2 target sequence
aagaagcaatatcaggtccag

SEQ ID NO: 1509 - DNA, 21 bp, Artificial Sequence
  Ang2 target sequence
aagcaatatcaggtccagcat

SEQ ID NO: 1510 - DNA, 21 bp, Artificial Sequence
  Ang2 target sequence
aatatcaggtccagcatgggt

SEQ ID NO: 1511 - DNA, 21 bp, Artificial Sequence
  Ang2 target sequence
aactgccgctcttcctccagc

SEQ ID NO: 1512 - DNA, 21 bp, Artificial Sequence
  Ang2 target sequence
aatgctgtgcagagggacgcg

SEQ ID NO: 1513 - DNA, 21 bp, Artificial Sequence
  Ang2 target sequence
aatacgatgactcggtgcaga

SEQ ID NO: 1514 - DNA, 21 bp, Artificial Sequence
  Ang2 target sequence
aagtgctggagaacatcatgg

SEQ ID NO: 1515 - DNA, 21 bp, Artificial Sequence
  Ang2 target sequence
aacatcatggaaaacaacact

SEQ ID NO: 1516 - DNA, 21 bp, Artificial Sequence
  Ang2 target sequence
aaaacaacactcagtggctaa

SEQ ID NO: 1517 - DNA, 21 bp, Artificial Sequence
  Ang2 target sequence
aaacaacactcagtggctaat

SEQ ID NO: 1518 - DNA, 21 bp, Artificial Sequence
  Ang2 target sequence
aacaacactcagtggctaatg

SEQ ID NO: 1519 - DNA, 21 bp, Artificial Sequence
  Ang2 target sequence
aacactcagtggctaatgaag

SEQ ID NO: 1520 - DNA, 21 bp, Artificial Sequence
  Ang2 target sequence
aatgaagcttgagaattatat

SEQ ID NO: 1521 - DNA, 21 bp, Artificial Sequence
  Ang2 target sequence
aagcttgagaattatatccag

SEQ ID NO: 1522 - DNA, 21 bp, Artificial Sequence
  Ang2 target sequence
aattatatccaggacaacatg

SEQ ID NO: 1523 - DNA, 21 bp, Artificial Sequence
  Ang2 target sequence
aacatgaagaaagaaatggta

SEQ ID NO: 1524 - DNA, 21 bp, Artificial Sequence
  Ang2 target sequence
aagaaagaaatggtagagata

SEQ ID NO: 1525 - DNA, 21 bp, Artificial Sequence
  Ang2 target sequence
aaagaaatggtagagatacag

SEQ ID NO: 1526 - DNA, 21 bp, Artificial Sequence
  Ang2 target sequence
aagaaatggtagagatacagc

SEQ ID NO: 1527 - DNA, 21 bp, Artificial Sequence
  Ang2 target sequence
aaatggtagagatacagcaga

SEQ ID NO: 1528 - DNA, 21 bp, Artificial Sequence
  Ang2 target sequence
aatggtagagatacagcagaa

SEQ ID NO: 1529 - DNA, 21 bp, Artificial Sequence
  Ang2 target sequence
aatgcagtacagaaccagacg

SEQ ID NO: 1530 - DNA, 21 bp, Artificial Sequence
  Ang2 target sequence
aaccagacggctgtgatgata

SEQ ID NO: 1531 - DNA, 21 bp, Artificial Sequence
  Ang2 target sequence
aaatagggacaaacctgttga

SEQ ID NO: 1532 - DNA, 21 bp, Artificial Sequence
  Ang2 target sequence
aatagggacaaacctgttgaa

SEQ ID NO: 1533 - DNA, 21 bp, Artificial Sequence
  Ang2 target sequence
aaacctgttgaaccaaacagc

SEQ ID NO: 1534 - DNA, 21 bp, Artificial Sequence
  Ang2 target sequence
aacctgttgaaccaaacagct

SEQ ID NO: 1535 - DNA, 21 bp, Artificial Sequence
  Ang2 target sequence
aaccaaacagctgagcaaacg

SEQ ID NO: 1536 - DNA, 21 bp, Artificial Sequence
  Ang2 target sequence
aaacagctgagcaaacgcgga

SEQ ID NO: 1537 - DNA, 21 bp, Artificial Sequence
  Ang2 target sequence
aacagctgagcaaacgcggaa

SEQ ID NO: 1538 - DNA, 21 bp, Artificial Sequence
  Ang2 target sequence
aaacgcggaagttaactgatg

SEQ ID NO: 1539 - DNA, 21 bp, Artificial Sequence
  Ang2 target sequence
aacgcggaagttaactgatgt

SEQ ID NO: 1540 - DNA, 21 bp, Artificial Sequence
  Ang2 target sequence
aagttaactgatgtggaagcc

SEQ ID NO: 1541 - DNA, 21 bp, Artificial Sequence
  Ang2 target sequence
aactgatgtggaagcccaagt

SEQ ID NO: 1542 - DNA, 21 bp, Artificial Sequence
  Ang2 target sequence
aagcccaagtattaaatcaga

SEQ ID NO: 1543 - DNA, 21 bp, Artificial Sequence
  Ang2 target sequence
aagtattaaatcagaccacga

SEQ ID NO: 1544 - DNA, 21 bp, Artificial Sequence
  Ang2 target sequence
aaatcagaccacgagacttga

SEQ ID NO: 1545 - DNA, 21 bp, Artificial Sequence
  Ang2 target sequence
aatcagaccacgagacttgaa

SEQ ID NO: 1546 - DNA, 21 bp, Artificial Sequence
  Ang2 target sequence
aacttcagctcttggaacact

SEQ ID NO: 1547 - DNA, 21 bp, Artificial Sequence
  Ang2 target sequence
aacactccctctcgacaaaca

SEQ ID NO: 1548 - DNA, 21 bp, Artificial Sequence
  Ang2 target sequence
aaacaaattggaaaaacagat

SEQ ID NO: 1549 - DNA, 21 bp, Artificial Sequence
  Ang2 target sequence
aacaaattggaaaaacagatt

SEQ ID NO: 1550 - DNA, 21 bp, Artificial Sequence
  Ang2 target sequence
aaattggaaaaacagattttg

SEQ ID NO: 1551 - DNA, 21 bp, Artificial Sequence
  Ang2 target sequence
aattggaaaaacagattttgg

SEQ ID NO: 1552 - DNA, 21 bp, Artificial Sequence
  Ang2 target sequence
aaaaacagattttggaccaga

SEQ ID NO: 1553 - DNA, 21 bp, Artificial Sequence
  Ang2 target sequence
aaaacagattttggaccagac

SEQ ID NO: 1554 - DNA, 21 bp, Artificial Sequence
  Ang2 target sequence
aaacagattttggaccagacc

SEQ ID NO: 1555 - DNA, 21 bp, Artificial Sequence
  Ang2 target sequence
aacagattttggaccagacca

SEQ ID NO: 1556 - DNA, 21 bp, Artificial Sequence
  Ang2 target sequence
aaataaacaaattgcaagata

SEQ ID NO: 1557 - DNA, 21 bp, Artificial Sequence
  Ang2 target sequence
aataaacaaattgcaagataa

SEQ ID NO: 1558 - DNA, 21 bp, Artificial Sequence
  Ang2 target sequence
aaacaaattgcaagataagaa

SEQ ID NO: 1559 - DNA, 21 bp, Artificial Sequence
  Ang2 target sequence
aacaaattgcaagataagaac

SEQ ID NO: 1560 - DNA, 21 bp, Artificial Sequence
  Ang2 target sequence
aaattgcaagataagaacagt

SEQ ID NO: 1561 - DNA, 21 bp, Artificial Sequence
  Ang2 target sequence
aattgcaagataagaacagtt

SEQ ID NO: 1562 - DNA, 21 bp, Artificial Sequence
  Ang2 target sequence
aagataagaacagtttcctag

SEQ ID NO: 1563 - DNA, 21 bp, Artificial Sequence
  Ang2 target sequence
aagaacagtttcctagaaaag

SEQ ID NO: 1564 - DNA, 21 bp, Artificial Sequence
  Ang2 target sequence
aacagtttcctagaaaagaag

SEQ ID NO: 1565 - DNA, 21 bp, Artificial Sequence
  Ang2 target sequence
aaaagaaggtgctagctatgg

SEQ ID NO: 1566 - DNA, 21 bp, Artificial Sequence
  Ang2 target sequence
aaagaaggtgctagctatgga

SEQ ID NO: 1567 - DNA, 21 bp, Artificial Sequence
  Ang2 target sequence
aagaaggtgctagctatggaa

SEQ ID NO: 1568 - DNA, 21 bp, Artificial Sequence
  Ang2 target sequence
aaggtgctagctatggaagac

SEQ ID NO: 1569 - DNA, 21 bp, Artificial Sequence
  Ang2 target sequence
aagacaagcacatcatccaac

SEQ ID NO: 1570 - DNA, 21 bp, Artificial Sequence
  Ang2 target sequence
aagcacatcatccaactacag

SEQ ID NO: 1571 - DNA, 21 bp, Artificial Sequence
  Ang2 target sequence
aactacagtcaataaaagaag

SEQ ID NO: 1572 - DNA, 21 bp, Artificial Sequence
  Ang2 target sequence
aataaaagaagagaaagatca

SEQ ID NO: 1573 - DNA, 21 bp, Artificial Sequence
  Ang2 target sequence
aaaagaagagaaagatcagct

SEQ ID NO: 1574 - DNA, 21 bp, Artificial Sequence
  Ang2 target sequence
aaagaagagaaagatcagcta

SEQ ID NO: 1575 - DNA, 21 bp, Artificial Sequence
  Ang2 target sequence
aagaagagaaagatcagctac

SEQ ID NO: 1576 - DNA, 21 bp, Artificial Sequence
  Ang2 target sequence
aagagaaagatcagctacagg

SEQ ID NO: 1577 - DNA, 21 bp, Artificial Sequence
  Ang2 target sequence
aaagatcagctacaggtgtta

SEQ ID NO: 1578 - DNA, 21 bp, Artificial Sequence
  Ang2 target sequence
aagatcagctacaggtgttag

SEQ ID NO: 1579 - DNA, 21 bp, Artificial Sequence
  Ang2 target sequence
aagcaaaattccatcattgaa

SEQ ID NO: 1580 - DNA, 21 bp, Artificial Sequence
  Ang2 target sequence
aaaattccatcattgaagaac

SEQ ID NO: 1581 - DNA, 21 bp, Artificial Sequence
  Ang2 target sequence
aaattccatcattgaagaact

SEQ ID NO: 1582 - DNA, 21 bp, Artificial Sequence
  Ang2 target sequence
aattccatcattgaagaacta

SEQ ID NO: 1583 - DNA, 21 bp, Artificial Sequence
  Ang2 target sequence
aagaactagaaaaaaaaatag

SEQ ID NO: 1584 - DNA, 21 bp, Artificial Sequence
  Ang2 target sequence
aactagaaaaaaaaatagtga

SEQ ID NO: 1585 - DNA, 21 bp, Artificial Sequence
  Ang2 target sequence
aaaaaaaaatagtgactgcca

SEQ ID NO: 1586 - DNA, 21 bp, Artificial Sequence
  Ang2 target sequence
aaaaaaaatagtgactgccac

SEQ ID NO: 1587 - DNA, 21 bp, Artificial Sequence
  Ang2 target sequence
aaaaaaatagtgactgccacg

SEQ ID NO: 1588 - DNA, 21 bp, Artificial Sequence
  Ang2 target sequence
aaaaaatagtgactgccacgg

SEQ ID NO: 1589 - DNA, 21 bp, Artificial Sequence
  Ang2 target sequence
aaaaatagtgactgccacggt

SEQ ID NO: 1590 - DNA, 21 bp, Artificial Sequence
  Ang2 target sequence
aaaatagtgactgccacggtg

SEQ ID NO: 1591 - DNA, 21 bp, Artificial Sequence
  Ang2 target sequence
aaatagtgactgccacggtga

SEQ ID NO: 1592 - DNA, 21 bp, Artificial Sequence
  Ang2 target sequence
aatagtgactgccacggtgaa

SEQ ID NO: 1593 - DNA, 21 bp, Artificial Sequence
  Ang2 target sequence
aataattcagttcttcaaaag

SEQ ID NO: 1594 - DNA, 21 bp, Artificial Sequence
  Ang2 target sequence
aattcagttcttcaaaagcag

SEQ ID NO: 1595 - DNA, 21 bp, Artificial Sequence
  Ang2 target sequence
aaaagcagcaacatgatctca

SEQ ID NO: 1596 - DNA, 21 bp, Artificial Sequence
  Ang2 target sequence
aaagcagcaacatgatctcat

SEQ ID NO: 1597 - DNA, 21 bp, Artificial Sequence
  Ang2 target sequence
aagcagcaacatgatctcatg

SEQ ID NO: 1598 - DNA, 21 bp, Artificial Sequence
  Ang2 target sequence
aacatgatctcatggagacag

SEQ ID NO: 1599 - DNA, 21 bp, Artificial Sequence
  Ang2 target sequence
aataacttactgactatgatg

SEQ ID NO: 1600 - DNA, 21 bp, Artificial Sequence
  Ang2 target sequence
aacttactgactatgatgtcc

SEQ ID NO: 1601 - DNA, 21 bp, Artificial Sequence
  Ang2 target sequence
aaactcagctaaggaccccac

SEQ ID NO: 1602 - DNA, 21 bp, Artificial Sequence
  Ang2 target sequence
aactcagctaaggaccccact

SEQ ID NO: 1603 - DNA, 21 bp, Artificial Sequence
  Ang2 target sequence
aaggaccccactgttgctaaa

SEQ ID NO: 1604 - DNA, 21 bp, Artificial Sequence
  Ang2 target sequence
aaagaagaacaaatcagcttc

SEQ ID NO: 1605 - DNA, 21 bp, Artificial Sequence
  Ang2 target sequence
aagaagaacaaatcagcttca

SEQ ID NO: 1606 - DNA, 21 bp, Artificial Sequence
  Ang2 target sequence
aagaacaaatcagcttcagag

SEQ ID NO: 1607 - DNA, 21 bp, Artificial Sequence
  Ang2 target sequence
aacaaatcagcttcagagact

SEQ ID NO: 1608 - DNA, 21 bp, Artificial Sequence
  Ang2 target sequence
aaatcagcttcagagactgtg

SEQ ID NO: 1609 - DNA, 21 bp, Artificial Sequence
  Ang2 target sequence
aatcagcttcagagactgtgc

SEQ ID NO: 1610 - DNA, 21 bp, Artificial Sequence
  Ang2 target sequence
aagtattcaaatcaggacaca

SEQ ID NO: 1611 - DNA, 21 bp, Artificial Sequence
  Ang2 target sequence
aaatcaggacacaccacaaat

SEQ ID NO: 1612 - DNA, 21 bp, Artificial Sequence
  Ang2 target sequence
aatcaggacacaccacaaatg

SEQ ID NO: 1613 - DNA, 21 bp, Artificial Sequence
  Ang2 target sequence
aaatggcatctacacgttaac

SEQ ID NO: 1614 - DNA, 21 bp, Artificial Sequence
  Ang2 target sequence
aatggcatctacacgttaaca

SEQ ID NO: 1615 - DNA, 21 bp, Artificial Sequence
  Ang2 target sequence
aacattccctaattctacaga

SEQ ID NO: 1616 - DNA, 21 bp, Artificial Sequence
  Ang2 target sequence
aattctacagaagagatcaag

SEQ ID NO: 1617 - DNA, 21 bp, Artificial Sequence
  Ang2 target sequence
aagagatcaaggcctactgtg

SEQ ID NO: 1618 - DNA, 21 bp, Artificial Sequence
  Ang2 target sequence
aaggcctactgtgacatggaa

SEQ ID NO: 1619 - DNA, 21 bp, Artificial Sequence
  Ang2 target sequence
aagctggaggaggcgggtgga

SEQ ID NO: 1620 - DNA, 21 bp, Artificial Sequence
  Ang2 target sequence
aattattcagcgacgtgagga

SEQ ID NO: 1621 - DNA, 21 bp, Artificial Sequence
  Ang2 target sequence
aaagaatataaagtgggattt

SEQ ID NO: 1622 - DNA, 21 bp, Artificial Sequence
  Ang2 target sequence
aagaatataaagtgggatttg

SEQ ID NO: 1623 - DNA, 21 bp, Artificial Sequence
  Ang2 target sequence
aatataaagtgggatttggta

SEQ ID NO: 1624 - DNA, 21 bp, Artificial Sequence
  Ang2 target sequence
aaagtgggatttggtaaccct

SEQ ID NO: 1625 - DNA, 21 bp, Artificial Sequence
  Ang2 target sequence
aagtgggatttggtaaccctt

SEQ ID NO: 1626 - DNA, 21 bp, Artificial Sequence
  Ang2 target sequence
aacccttcaggagaatattgg

SEQ ID NO: 1627 - DNA, 21 bp, Artificial Sequence
  Ang2 target sequence
aatattggctgggaaatgagt

SEQ ID NO: 1628 - DNA, 21 bp, Artificial Sequence
  Ang2 target sequence
aaatgagtttgtttcgcaact

SEQ ID NO: 1629 - DNA, 21 bp, Artificial Sequence
  Ang2 target sequence
aatgagtttgtttcgcaactg

SEQ ID NO: 1630 - DNA, 21 bp, Artificial Sequence
  Ang2 target sequence
aactgactaatcagcaacgct

SEQ ID NO: 1631 - DNA, 21 bp, Artificial Sequence
  Ang2 target sequence
aatcagcaacgctatgtgctt

SEQ ID NO: 1632 - DNA, 21 bp, Artificial Sequence
  Ang2 target sequence
aacgctatgtgcttaaaatac

SEQ ID NO: 1633 - DNA, 21 bp, Artificial Sequence
  Ang2 target sequence
aaaatacaccttaaagactgg

SEQ ID NO: 1634 - DNA, 21 bp, Artificial Sequence
  Ang2 target sequence
aaatacaccttaaagactggg

SEQ ID NO: 1635 - DNA, 21 bp, Artificial Sequence
  Ang2 target sequence
aatacaccttaaagactggga

SEQ ID NO: 1636 - DNA, 21 bp, Artificial Sequence
  Ang2 target sequence
aaagactgggaagggaatgag

SEQ ID NO: 1637 - DNA, 21 bp, Artificial Sequence
  Ang2 target sequence
aagactgggaagggaatgagg

SEQ ID NO: 1638 - DNA, 21 bp, Artificial Sequence
  Ang2 target sequence
aagggaatgaggcttactcat

SEQ ID NO: 1639 - DNA, 21 bp, Artificial Sequence
  Ang2 target sequence
aatgaggcttactcattgtat

SEQ ID NO: 1640 - DNA, 21 bp, Artificial Sequence
  Ang2 target sequence
aacatttctatctctcaagtg

SEQ ID NO: 1641 - DNA, 21 bp, Artificial Sequence
  Ang2 target sequence
aagtgaagaactcaattatag

SEQ ID NO: 1642 - DNA, 21 bp, Artificial Sequence
  Ang2 target sequence
aagaactcaattataggattc

SEQ ID NO: 1643 - DNA, 21 bp, Artificial Sequence
  Ang2 target sequence
aactcaattataggattcacc

SEQ ID NO: 1644 - DNA, 21 bp, Artificial Sequence
  Ang2 target sequence
aattataggattcaccttaaa

SEQ ID NO: 1645 - DNA, 21 bp, Artificial Sequence
  Ang2 target sequence
aaaggacttacagggacagcc

SEQ ID NO: 1646 - DNA, 21 bp, Artificial Sequence
  Ang2 target sequence
aaggacttacagggacagccg

SEQ ID NO: 1647 - DNA, 21 bp, Artificial Sequence
  Ang2 target sequence
aaaataagcagcatcagccaa

SEQ ID NO: 1648 - DNA, 21 bp, Artificial Sequence
  Ang2 target sequence
aaataagcagcatcagccaac

SEQ ID NO: 1649 - DNA, 21 bp, Artificial Sequence
  Ang2 target sequence
aataagcagcatcagccaacc

SEQ ID NO: 1650 - DNA, 21 bp, Artificial Sequence
  Ang2 target sequence
aagcagcatcagccaaccagg

SEQ ID NO: 1651 - DNA, 21 bp, Artificial Sequence
  Ang2 target sequence
aaccaggaaatgattttagca

SEQ ID NO: 1652 - DNA, 21 bp, Artificial Sequence
  Ang2 target sequence
aaatgattttagcacaaagga

SEQ ID NO: 1653 - DNA, 21 bp, Artificial Sequence
  Ang2 target sequence
aatgattttagcacaaaggat

SEQ ID NO: 1654 - DNA, 21 bp, Artificial Sequence
  Ang2 target sequence
aaaggatggagacaacgacaa

SEQ ID NO: 1655 - DNA, 21 bp, Artificial Sequence
  Ang2 target sequence
aaggatggagacaacgacaaa

SEQ ID NO: 1656 - DNA, 21 bp, Artificial Sequence
  Ang2 target sequence
aacgacaaatgtatttgcaaa

SEQ ID NO: 1657 - DNA, 21 bp, Artificial Sequence
  Ang2 target sequence
aaatgtatttgcaaatgttca

SEQ ID NO: 1658 - DNA, 21 bp, Artificial Sequence
  Ang2 target sequence
aatgtatttgcaaatgttcac

SEQ ID NO: 1659 - DNA, 21 bp, Artificial Sequence
  Ang2 target sequence
aaatgttcacaaatgctaaca

SEQ ID NO: 1660 - DNA, 21 bp, Artificial Sequence
  Ang2 target sequence
aatgttcacaaatgctaacag

SEQ ID NO: 1661 - DNA, 21 bp, Artificial Sequence
  Ang2 target sequence
aaatgctaacaggaggctggt

SEQ ID NO: 1662 - DNA, 21 bp, Artificial Sequence
  Ang2 target sequence
aatgctaacaggaggctggtg

SEQ ID NO: 1663 - DNA, 21 bp, Artificial Sequence
  Ang2 target sequence
aacaggaggctggtggtttga

SEQ ID NO: 1664 - DNA, 21 bp, Artificial Sequence
  Ang2 target sequence
aacttgaacggaatgtactat

SEQ ID NO: 1665 - DNA, 21 bp, Artificial Sequence
  Ang2 target sequence
aacggaatgtactatccacag

SEQ ID NO: 1666 - DNA, 21 bp, Artificial Sequence
  Ang2 target sequence
aatgtactatccacagaggca

SEQ ID NO: 1667 - DNA, 21 bp, Artificial Sequence
  Ang2 target sequence
aacacaaataagttcaacggc

SEQ ID NO: 1668 - DNA, 21 bp, Artificial Sequence
  Ang2 target sequence
aaataagttcaacggcattaa

SEQ ID NO: 1669 - DNA, 21 bp, Artificial Sequence
  Ang2 target sequence
aataagttcaacggcattaaa

SEQ ID NO: 1670 - DNA, 21 bp, Artificial Sequence
  Ang2 target sequence
aagttcaacggcattaaatgg

SEQ ID NO: 1671 - DNA, 21 bp, Artificial Sequence
  Ang2 target sequence
aacggcattaaatggtactac

SEQ ID NO: 1672 - DNA, 21 bp, Artificial Sequence
  Ang2 target sequence
aaatggtactactggaaaggc

SEQ ID NO: 1673 - DNA, 21 bp, Artificial Sequence
  Ang2 target sequence
aatggtactactggaaaggct

SEQ ID NO: 1674 - DNA, 21 bp, Artificial Sequence
  Ang2 target sequence
aaaggctcaggctattcgctc

SEQ ID NO: 1675 - DNA, 21 bp, Artificial Sequence
  Ang2 target sequence
aaggctcaggctattcgctca

SEQ ID NO: 1676 - DNA, 21 bp, Artificial Sequence
  Ang2 target sequence
agcctataacaactttcggaa

SEQ ID NO: 1677 - DNA, 21 bp, Artificial Sequence
  Ang2 target sequence
atcaggtccagcatgggtcct

SEQ ID NO: 1678 - DNA, 21 bp, Artificial Sequence
  Ang2 target sequence
gacaactgccgctcttcctcc

SEQ ID NO: 1679 - DNA, 21 bp, Artificial Sequence
  Ang2 target sequence
ctcgaatacgatgactcggtg

SEQ ID NO: 1680 - DNA, 21 bp, Artificial Sequence
  Ang2 target sequence
tggctaatgaagcttgagaat

SEQ ID NO: 1681 - DNA, 21 bp, Artificial Sequence
  Ang2 target sequence
tccaggacaacatgaagaaag

SEQ ID NO: 1682 - DNA, 21 bp, Artificial Sequence
  Ang2 target sequence
acggctgtgatgatagaaata

SEQ ID NO: 1683 - DNA, 21 bp, Artificial Sequence
  Ang2 target sequence
gcaaacgcggaagttaactga

SEQ ID NO: 1684 - DNA, 21 bp, Artificial Sequence
  Ang2 target sequence
cagaccacgagacttgaactt

SEQ ID NO: 1685 - DNA, 21 bp, Artificial Sequence
  Ang2 target sequence
ccagaccagtgaaataaacaa

SEQ ID NO: 1686 - DNA, 21 bp, Artificial Sequence
  Ang2 target sequence
tgcaagataagaacagtttcc

SEQ ID NO: 1687 - DNA, 21 bp, Artificial Sequence
  Ang2 target sequence
tacagtcaataaaagaagaga

SEQ ID NO: 1688 - DNA, 21 bp, Artificial Sequence
  Ang2 target sequence
ttagtatccaagcaaaattcc

SEQ ID NO: 1689 - DNA, 21 bp, Artificial Sequence
  Ang2 target sequence
actgccacggtgaataattca

SEQ ID NO: 1690 - DNA, 21 bp, Artificial Sequence
  Ang2 target sequence
atgatgtccacatcaaactca

SEQ ID NO: 1691 - DNA, 21 bp, Artificial Sequence
  Ang2 target sequence
gtgctgaagtattcaaatcag

SEQ ID NO: 1692 - DNA, 21 bp, Artificial Sequence
  Ang2 target sequence
gatcaaggcctactgtgacat

SEQ ID NO: 1693 - DNA, 21 bp, Artificial Sequence
  Ang2 target sequence
attcagcgacgtgaggatggc

SEQ ID NO: 1694 - DNA, 21 bp, Artificial Sequence
  Ang2 target sequence
ttcagaggacttggaaagaat

SEQ ID NO: 1695 - DNA, 21 bp, Artificial Sequence
  Ang2 target sequence
tcgcaactgactaatcagcaa

SEQ ID NO: 1696 - DNA, 21 bp, Artificial Sequence
  Ang2 target sequence
agactgggaagggaatgaggc

SEQ ID NO: 1697 - DNA, 21 bp, Artificial Sequence
  Ang2 target sequence
actcattgtatgaacatttct

SEQ ID NO: 1698 - DNA, 21 bp, Artificial Sequence
  Ang2 target sequence
cagccggcaaaataagcagca

SEQ ID NO: 1699 - DNA, 21 bp, Artificial Sequence
  Ang2 target sequence
tagcacaaaggatggagacaa

SEQ ID NO: 1700 - DNA, 21 bp, Artificial Sequence
  Ang2 target sequence
gttcacaaatgctaacaggag

SEQ ID NO: 1701 - DNA, 21 bp, Artificial Sequence
  Ang2 target sequence
tgtactatccacagaggcaga

SEQ ID NO: 1702 - DNA, 21 bp, Artificial Sequence
  Ang2 target sequence
cggcattaaatggtactactg

SEQ ID NO: 1703 - DNA, 21 bp, Artificial Sequence
  Ang2 target sequence
caaggccacaaccatgatgat

SEQ ID NO: 1704 - DNA, 777 bp, Homo sapiens
  CDS (29)..(775)
ctgagatcaccggcgaaggagggccaccatggcgcacgctgggagaagtggttacgataaccgggagatagtgatgaagtacatccattataagctgtcgcagaggggctacgagtgggatgcgggagatgtgggcgccgcgcccccgggggccgcccccgcaccgggcttcttctcctcccagcccgggcacacgccccatccagccgcatcccgggacccggtcgccaggacctcgccactacagaccccggctgcccccggcgccgccgcggggcctgcgctcagcccggtgccacctgtggtccacctgaccctccgccaggccggcgacgacttctcccgccgctaccgccgcgacttcgccgagatgtccagccagctgcacctgacgcccttcaccgcgcggggatgctttgccacggtggtggaggagctcttcagggacggggtgaactgggggaggattgtggccttctttgagttcggtggggtcatgtgtgtggagagcgtcaaccgggagatgtcgcccctggtggacaacatcgccctgtggatgactgagtacctgaaccggcacctgcacacctggatccaggataacggaggctgggatgcctttgtggaactgtacggccccagcatgcggcctctgtttgatttctcctggctgtctctgaagactctgctcagtttggccctggtgggagcttgcatcaccctgggtgcctatctgggccacaagtgaagtcaacatgcctgccccaaacaaatatg

SEQ ID NO: 1705 - protein, 239 aa, Homo sapiens [sequence omitted]

SEQ ID NO: 1706 - DNA, 741 bp, Mus musculus
  CDS (2)..(709)
catggcgcaagccgggagaacagggtatgataaccgggagatcgtgatgaagtacatacattataagctgtcacagaggggctacgagtgggatgctggagatgcggacgcggcgcccctgggggctgcccccacccctggcatcttctccttccagcctgagagcaacccaatgcccgctgtgcaccgggacatggctgccaggacgtctcctctcaggcccctcgttgccaccgctgggcctgcgctcagccctgtgccacctgtggtccatctgaccctccgccgggctggggatgacttctctcgtcgctaccgtcgtgacttcgcagagatgtccagtcagctgcacctgacgcccttcaccgcgaggggacgctttgccacggtggtggaggaactcttcagggatggggtgaactgggggaggattgtggccttctttgagttcggtggggtcatgtgtgtggagagcgtcaacagggagatgtcacccctggtggacaacatcgccctgtggatgactgagtacctgaaccggcatctgcacacctggatccaggataacggaggctgggatgcctttgtggaactatatggccccagcatgcgacctctgtttgatttctcctggctgtctctgaagaccctgctcagcctggccctggtcggggcctgcatcactctgggtgcatacctgggccacaagtgaggtcgacaaacctgccccaaacaaatatg

SEQ ID NO: 1707 - protein, 236 aa, Mus musculus
MAQAGRTGYDNREIVMKYIHYKLSQRGYEWDAGDADAAPLGAAPTPGIFSFQPESNPMPAVHRDMAARTSPLRPLVATAGPALSPVPPVVHLTLRRAGDDFSRRYRRDFAEMSSQLHLTPFTARGRFATVVEELFRDGVNWGRIVAFFEFGGVMCVESVNREMSPLVDNIALWMTEYLNRHLHTWIQDNGGWDAFVELYGPSMRPLFDFSWLSLKTLLSLALVGACITLGAYLGHK

SEQ ID NO: 1708 - DNA, 733 bp, Homo sapiens
  CDS (27)..(725)
ctgagatcaccggtaggagggccatcatgtctcagagcaaccgggagctggtggttgactttctctcctacaagctttcccagaaaggatacagctggagtcagtttagtgatgtggaagagaacaggactgaggccccagaagggactgaatcggagatggagacccccagtgccatcaatggcaacccatcctggcacctggcagacagccccgcggtgaatggagccactggccacagcagcagtttggatgcccgggaggtgatccccatggcagcagtaaagcaagcgctgagggaggcaggcgacgagtttgaactgcggtaccggcgggcattcagtgacctgacatcccagctccacatcaccccagggacagcatatcagagctttgaacaggtagtgaatgaactcttccgggatggggtaaactggggtcgcattgtggcctttttctccttcggcggggcactgtgtgtggaaagcgtagacaaggagatgcaggtattggtgagtcggatcgcagcttggatggccacttacctgaatgaccacctagagccttggatccaggagaacggcggctgggatacttttgtggaactctatgggaacaatgcagcagccgagagccgaaagggccaggaacgcttcaaccgctggttcctgacgggcatgactgtggccggcgtggttctgctgggctcactcttcagtcggaaatgaattcg

SEQ ID NO: 1709 - protein, 233 aa, Homo sapiens
MSQSNRELVVDFLSYKLSQKGYSWSQFSDVEENRTEAPEGTESEMETPSAINGNPSWHLADSPAVNGATGHSSSLDAREVIPMAAVKQALREAGDEFELRYRRAFSDLTSQLHITPGTAYQSFEQVVNELFRDGVNWGRIVAFFSFGGALCVESVDKEMQVLVSRIAAWMATYLNDHLEPWIQENGGWDTFVELYGNNAAAESRKGQERFNRWFLTGMTVAGVVLLGSLFSRK

SEQ ID NO: 1710 - DNA, 550 bp, Homo sapiens
  CDS (27)..(530)
ctgagatcaccggtaggagggccaacatgttccagatcccagagtttgagccgagtgagcaggaagactccagctctgcagagaggggcctgggccccagccccgcaggggacgggccctcaggctccggcaagcatcatcgccaggccccaggcctcctgtgggacgccagtcaccagcaggagcagccaaccagcagcagccatcatggaggcgctggggctgtggagatccggagtcgccacagctcctaccccgcggggacggaggacgacgaagggatgggggaggagcccagcccctttcggggccgctcgcgctcggcgccccccaacctctgggcagcacagcgctatggccgcgagctccggaggatgagtgacgagtttgtggactcctttaagaagggacttcctcgcccgaagagcgcgggcacagcaacgcagatgcggcaaagctccagctggacgcgagtcttccagtcctggtgggatcggaacttgggcaggggaagctccgccccctcccagtgaccttcgctccacatccg

SEQ ID NO: 1711 - protein, 168 aa, Homo sapiens
MFQIPEFEPSEQEDSSSAERGLGPSPAGDGPSGSGKHHRQAPGLLWDASHQQEQPTSSSHHGGAGAVEIRSRHSSYPAGTEDDEGMGEEPSPFRGRSRSAPPNLWAAQRYGRELRRMSDEFVDSFKKGLPRPKSAGTATQMRQSSSWTRVFQSWWDRNLGRGSSAPSQ

SEQ ID NO: 1712 - DNA, 644 bp, Mus musculus
  CDS (2)..(613)
catgggaaccccaaagcagccctcgctggctcctgcacacgccctaggcttgaggaagtccgatcccggaatccggagcctggggagcgacgcgggaggaaggcggtggagaccagcagcccagagtatgttccagatcccagagtttgagccgagtgagcaggaagacgctagtgctacagataggggcctgggccctagcctcactgaggaccagccaggtccctacctggccccaggtctcctggggagcaacattcatcagcagggacgggcagccaccaacagtcatcatggaggcgcaggggctatggagactcggagtcgccacagttcgtacccagcggggaccgaggaggatgaagggatggaggaggagcttagcccttttcgaggacgctcgcgttcggctccccccaatctctgggcagcgcagcgctacggccgtgagctccgaaggatgagcgatgagtttgagggttccttcaagggacttcctcgcccaaagagcgcaggcactgcaacacagatgcgacaaagcgccggctggacgcgcattatccagtcctggtgggatcgaaacttgggcaaaggaggctccaccccctcccagtgatcttctgctccacatcccggaactctag

SEQ ID NO: 1713 - protein, 204 aa, Mus musculus
MGTPKQPSLAPAHALGLRKSDPGIRSLGSDAGGRRWRPAAQSMFQIPEFEPSEQEDASATDRGLGPSLTEDQPGPYLAPGLLGSNIHQQGRAATNSHHGGAGAMETRSRHSSYPAGTEEDEGMEEELSPFRGRSRSAPPNLWAAQRYGRELRRMSDEFEGSFKGLPRPKSAGTATQMRQSAGWTRIIQSWWDRNLGKGGSTPSQ

SEQ ID NO: 1714 - DNA, 729 bp, Homo sapiens
  CDS (29)..(661)
ctgagatcaccggcgaaggagggccaccatggcttcggggcaaggcccaggtcctcccaggcaggagtgcggagagcctgccctgccctctgcttctgaggagcaggtagcccaggacacagaggaggttttccgcagctacgttttttaccgccatcagcaggaacaggaggctgaaggggtggctgcccctgccgacccagagatggtcaccttacctctgcaacctagcagcaccatggggcaggtgggacggcagctcgccatcatcggggacgacatcaaccgacgctatgactcagagttccagaccatgttgcagcacctgcagcccacggcagagaatgcctatgagtacttcaccaagattgccaccagcctgtttgagagtggcatcaattggggccgtgtggtggctcttctgggcttcggctaccgtctggccctacacgtctaccagcatggcctgactggcttcctaggccaggtgacccgcttcgtggtcgacttcatgctgcatcactgcattgcccggtggattgcacagaggggtggctgggtggcagccctgaacttgggcaatggtcccatcctgaacgtgctggtggttctgggtgtggttctgttgggccagtttgtggtacgaagattcttcaaatcatgactcccaagggtgccctttgggtcccggttcagacccctgcctggacttaagcgaagtctttgccg

SEQ ID NO: 1715 - protein, 211 aa, Homo sapiens
MASGQGPGPPRQECGEPALPSASEEQVAQDTEEVFRSYVFYRHQQEQEAEGVAAPADPEMVTLPLQPSSTMGQVGRQLAIIGDDINRRYDSEFQTMLQHLQPTAENAYEYFTKIATSLFESGINWGRVVALLGFGYRLALHVYQHGLTGFLGQVTRFVVDFMLHHCIARWIAQRGGWVAALNLGNGPILNVLVVLGVVLLGQFVVRRFFKS

SEQ ID NO: 1716 - DNA, 609 bp, Homo sapiens
  CDS (29)..(604)
ctgagatcaccggcgaaggagggccaccatggacgggtccggggagcagcccagaggcggggggcccaccagctctgagcagatcatgaagacaggggcccttttgcttcagggtttcatccaggatcgagcagggcgaatggggggggaggcacccgagctggccctggacccggtgcctcaggatgcgtccaccaagaagctgagcgagtgtctcaagcgcatcggggacgaactggacagtaacatggagctgcagaggatgattgccgccgtggacacagactccccccgagaggtctttttccgagtggcagctgacatgttttctgacggcaacttcaactggggccgggttgtcgcccttttctactttgccagcaaactggtgctcaaggccctgtgcaccaaggtgccggaactgatcagaaccatcatgggctggacactggacttcctccgggagcggctgttgggctggatccaagaccagggtggttgggacggcctcctctcctactttgggacgcccacgtggcagaccgtgaccatctttgtggcgggagtgctcaccgcctcactcaccatctggaagaagatgggctgagc

SEQ ID NO: 1717 - protein, 192 aa, Homo sapiens
MDGSGEQPRGGGPTSSEQIMKTGALLLQGFIQDRAGRMGGEAPELALDPVPQDASTKKLSECLKRIGDELDSNMELQRMIAAVDTDSPREVFFRVAADMFSDGNFNWGRVVALFYFASKLVLKALCTKVPELIRTIMGWTLDFLRERLLGWIQDQGGWDGLLSYFGTPTWQTVTIFVAGVLTASLTIWKKMG

SEQ ID NO: 1718 - DNA, 585 bp, Mus musculus
  CDS (2)..(577)
catggacgggtccggggagcagcttgggagcggcgggcccaccagctctgaacagatcatgaagacaggggcctttttgctacagggtttcatccaggatcgagcagggaggatggctggggagacacctgagctgaccttggagcagccgccccaggatgcgtccaccaagaagctgagcgagtgtctccggcgaattggagatgaactggacagcaatatggagctgcagaggatgattgctgacgtggacacggactccccccgagaggtcttcttccgggtggcagctgacatgtttgctgatggcaacttcaactggggccgcgtggttgccctcttctactttgctagcaaactggtgctcaaggccctgtgcactaaagtgcccgagctgatcagaaccatcatgggctggacactggacttcctccgtgagcggctgcttgtctggatccaagaccagggtggctgggaaggcctcctctcctacttcgggacccccacatggcagacagtgaccatctttgtggctggagtcctcaccgcctcgctcaccatctggaagaagatgggctgaattcg

SEQ ID NO: 1719 - protein, 192 aa, Mus musculus
MDGSGEQLGSGGPTSSEQIMKTGAFLLQGFIQDRAGRMAGETPELTLEQPPQDASTKKLSECLRRIGDELDSNMELQRMIADVDTDSPREVFFRVAADMFADGNFNWGRVVALFYFASKLVLKALCTKVPELIRTIMGWTLDFLRERLLVWIQDQGGWEGLLSYFGTPTWQTVTIFVAGVLTASLTIWKKMG

SEQ ID NO: 1720 - DNA, 551 bp, Homo sapiens
  CDS (27)..(536)
ctgagatcaccggtaggagggccatcatgtctcagagcaaccgggagctggtggttgactttctctcctacaagctttcccagaaaggatacagctggagtcagtttagtgatgtggaagagaacaggactgaggccccagaagggactgaatcggagatggagacccccagtgccatcaatggcaacccatcctggcacctggcagacagccccgcggtgaatggagccactggccacagcagcagtttggatgcccgggaggtgatccccatggcagcagtaaagcaagcgctgagggaggcaggcgacgagtttgaactgcggtaccggcgggcattcagtgacctgacatcccagctccacatcaccccagggacagcatatcagagctttgaacaggatacttttgtggaactctatgggaacaatgcagcagccgagagccgaaagggccaggaacgcttcaaccgctggttcctgacgggcatgactgtggccggcgtggttctgctgggctcactcttcagtcggaaatgaattcgctagctc

SEQ ID NO: 1721 - protein, 170 aa, Homo sapiens
MSQSNRELVVDFLSYKLSQKGYSWSQFSDVEENRTEAPEGTESEMETPSAINGNPSWHLADSPAVNGATGHSSSLDAREVIPMAAVKQALREAGDEFELRYRRAFSDLTSQLHITPGTAYQSFEQDTFVELYGNNAAAESRKGQERFNRWFLTGMTVAGVVLLGSLFSRK

SEQ ID NO: 1722 - DNA, 544 bp, Homo sapiens
  CDS (29)..(508)
ctgagatcaccggcgaaggagggccaccatgtctgaagtaagacccctctccagagacatcttgatggagaccctcctgtatgagcagctcctggaacccccgaccatggaggttcttggcatgactgactctgaagaggacctggaccctatggaggacttcgattctttggaatgcatggagggcagtgacgcattggccctgcggctggcctgcatcggggacgagatggacgtgagcctcagggccccgcgcctggcccagctctccgaggtggccatgcacagcctgggtctggctttcatctacgaccagactgaggacatcagggatgttcttagaagtttcatggacggtttcaccacacttaaggagaacataatgaggttctggagatccccgaaccccgggtcctgggtgtcctgcgaacaggtgctgctggcgctgctgctgctgctggcgctgctgctgccgctgctcagcgggggcctgcacctgctgctcaagtgagcccccggcggctcaggcgtggctggccccacg

SEQ ID NO: 1723 - protein, 160 aa, Homo sapiens
MSEVRPLSRDILMETLLYEQLLEPPTMEVLGMTDSEEDLDPMEDFDSLECMEGSDALALRLACIGDEMDVSLRAPRLAQLSEVAMHSLGLAFIYDQTEDIRDVLRSFMDGFTTLKENIMRFWRSPNPGSWVSCEQVLLALLLLLALLLPLLSGGLHLLLK

SEQ ID NO: 1724 - DNA, 915 bp, Homo sapiens
  CDS (27)..(857)
ctgagatcaccggtaggagggccaccatggagaacactgaaaactcagtggattcaaaatccattaaaaatttggaaccaaagatcatacatggaagcgaatcaatggactctggaatatccctggacaacagttataaaatggattatcctgagatgggtttatgtataataattaataataagaattttcataaaagcactggaatgacatctcggtctggtacagatgtcgatgcagcaaacctcagggaaacattcagaaacttgaaatatgaagtcaggaataaaaatgatcttacacgtgaagaaattgtggaattgatgcgtgatgtttctaaagaagatcacagcaaaaggagcagttttgtttgtgtgcttctgagccatggtgaagaaggaataatttttggaacaaatggacctgttgacctgaaaaaaataacaaactttttcagaggggatcgttgtagaagtctaactggaaaacccaaacttttcattattcaggcctgccgtggtacagaactggactgtggcattgagacagacagtggtgttgatgatgacatggcgtgtcataaaataccagtggaggccgacttcttgtatgcatactccacagcacctggttattattcttggcgaaattcaaaggatggctcctggttcatccagtcgctttgtgccatgctgaaacagtatgccgacaagcttgaatttatgcacattcttacccgggttaaccgaaaggtggcaacagaatttgagtccttttcctttgacgctacttttcatgcaaagaaacagattccatgtattgtttccatgctcacaaaagaactctatttttatcactaaagaaatggttggttggtggttttttttagtttgtatgccaagtgagaagatggtg

SEQ ID NO: 1725 - protein, 277 aa, Homo sapiens
MENTENSVDSKSIKNLEPKIIHGSESMDSGISLDNSYKMDYPEMGLCIIINNKNFHKSTGMTSRSGTDVDAANLRETFRNLKYEVRNKNDLTREEIVELMRDVSKEDHSKRSSFVCVLLSHGEEGIIFGTNGPVDLKKITNFFRGDRCRSLTGKPKLFIIQACRGTELDCGIETDSGVDDDMACHKIPVEADFLYAYSTAPGYYSWRNSKDGSWFIQSLCAMLKQYADKLEFMHILTRVNRKVATEFESFSFDATFHAKKQIPCIVSMLTKELYFYH

SEQ ID NO: 1726 - DNA, 1184 bp, Homo sapiens
acgcgtcccaaaatggaacataaggaagtggttcttctacttcttttatttctgaaatcaggtcaaggagagcctctggatgactatgtgaatacccagggggcttcactgttcagtgtcactaagaagcagctgggagcaggaagtatagaagaatgtgcagcaaaatgtgaggaggacgaagaattcacctgcagggcattccaatatcacagtaaagagcaacaatgtgtgataatggctgaaaacaggaagtcctccataatcattaggatgagagatgtagttttatttgaaaagaaagtgtatctctcagagtgcaagactgggaatggaaagaactacagagggacgatgtccaaaacaaaaaatggcatcacctgtcaaaaatggagttccacttctccccacagacctagattctcacctgctacacacccctcagagggactggaggagaactactgcaggaatccagacaacgatccgcaggggccctggtgctatactactgatccagaaaagagatatgactactgcgacattcttgagtgtgaagaggaatgtatgcattgcagtggagaaaactatgacggcaaaatttccaagaccatgtctggactggaatgccaggcctgggactctcagagcccacacgctcatggatacattccttccaaatttccaaacaagaacctgaagaagaattactgtcgtaaccccgatagggagctgcggccttggtgtttcaccaccgaccccaacaagcgctgggaactttgtgacatcccccgctgcacaacacctccaccatcttctggtcccacctaccagtgtctgaagggaacaggtgaaaactatcgcgggaatgtggctgttaccgtgtccgggcacacctgtcagcactggagtgcacagacccctcacacacataacaggacaccagaaaacttcccctgcaaaaatttggatgaaaactactgccgcaatcctgacggaaaaagggccccatggtgccatacaaccaacagccaagtgcggtgggagtactgtaagataccgtcctgtgactcctccccagtatccacggaacaattggctcccacagcaccacctgagctaacccctgtggtccaggactgctaccatggtgatggacagagctagcgaggcacatcgtcgac

SEQ ID NO: 1727 - DNA, 1282 bp, Homo sapiens
acgcgtcccaggatgcaggccctggtgctactcctctgcattggagccctcctcgggcacagcagctgccagaaccctgccagccccccggaggagggctccccagaccccgacagcacaggggcgctggtggaggaggaggatcctttcttcaaagtccccgtgaacaagctggcagcggctgtctccaacttcggctatgacctgtaccgggtgcgatccagcatgagccccacgaccaacgtgctcctgtctcctctcagtgtggccacggccctctcggccctctcgctgggagcggagcagcgaacagaatccatcattcaccgggctctctactatgacttgatcagcagcccagacatccatggtacctataaggagctccttgacacggtcactgcccgccagaagaacctcaagagtgcctcccggatcgtctttgagaagaagctgcgcataaaatccagctttgtggcacctctggaaaagtcatatgggaccaggcccagagtcctgacgggcaaccctcgcttggacctgcaagagatcaacaactgggtgcaggcgcagatgaaagggaagctcgccaggtccacaaaggaaattcccgatgagatcagcattctccttctcggtgtggcgcacttcaaggggcagtgggtaacaaagtttgactccagaaagacttccctcgaggatttctacttggatgaagagaggaccgtgagggtccccatgatgtcggaccctaaggctgttttacgctatggcttggattcagatctcagctgcaagattgcccagctgcccttgaccggaagcatgagtatcatcttcttcctgcccctgaaagtgacccagaatttgaccttgatagaggagagcctcacctccgagttcattcatgacatagaccgagaactgaagaccgtgcaggcggtcctcactgtccccaagctgaagctgagttacgaaggcgaagtcaccaagtccctgcaggagatgaagctgcaatccttgtttgattcaccagactttagcaagatcacaggcaaacccatcaagctgactcaggtggaacaccgggctggctttgagtggaacgaggatggggcgggaaccacccccagcccagggctgcagcctgcccacctcaccttcccgctggactatcaccttaaccagcctttcatcttcgtactgagggacacagacacaggggcccttctcttcattggcaagattctggaccccaggggcccctaatatcccagtcgac

SEQ ID NO: 1728 - DNA, 63 bp, Artificial Sequence
  hVEGF#5-a insert
gatccacctcaccaaggccagcacttcaagagagtgctggccttggtgaggtttttttggaaa

SEQ ID NO: 1729 - DNA, 63 bp, Artificial Sequence
  hVEGF#5-b insert
agcttttccaaaaaaacctcaccaaggccagcactctcttgaagtgctggccttggtgaggtg

SEQ ID NO: 1730 - DNA, 63 bp, Artificial Sequence
  hVEGF#2-a insert
gatccgttcatggatgtctatcagttcaagagactgatagacatccatgaacttttttggaaa

SEQ ID NO: 1731 - DNA, 63 bp, Artificial Sequence
  hVEGF#2-b insert
agcttttccaaaaaagttcatggatgtctatcagtctcttgaactgatagacatccatgaacg

SEQ ID NO: 1732 - DNA, 63 bp, Artificial Sequence
  hHIF1-alpha#11-a insert
gatccagtcggacagcctcaccaattcaagagattggtgaggctgtccgactttttttggaaa

SEQ ID NO: 1733 - DNA, 63 bp, Artificial Sequence
  hHIF1-alpha#11-b insert
agcttttccaaaaaaagtcggacagcctcaccaatctcttgaattggtgaggctgtccgactg
